United States Patent Application Publication US 2017/0226598 A1 - sequence listing, part 2

SEQ ID NO: 6 - DNA, 226084 bp, Bacillus methylotrophicus
accttttccgtaagtgtattgctttccaacaggctgttcgaatcgatgtgtatcaccagccttataccatctaacccatgtctgaacctgtgtcttattcttaatattcaactcctgcaggatctctttcataggtacgcctgccaatctcatttctacagccttctgtttcacttcaaccggataactcactcttgtccccatagaaaaaacacctccaagtctaatttcggataacaatcatccgtattcaaacttgaaggtgtttttatttgtctcatcttatggggtcagtccctttgctgaatggctttttttcattttctatttttctttcatgacgagaacgacgcctgaaacaataagagccgccccgatccagaaggttcctccgatcgtctctcccagcagcagcccgccgagcaaagtcccggaaagcggctgaaagaagaaaaacagaccgccgcttgccgcattcagtaattgcaatccgcgattccaaagcatgaacgcgcaggcggttgagatcacacccagatataaaagtccgccccatatctcaggccgggcaagctgagacaaaggaatctcccgaagcgggcccgctgtaaacggggtcaggatgacaaatgcgacgcaaatggaatacgttgtgacgacaagcggtgagtaatggccgggaacccgtttcatcagcacggacatcaaagcccatgtcagcgccgcagccagaagcgagagaccgccgagctggctcgacatattgagatctccgttccccacaatgagcaatactccgatcgtcgccagccctgtcgatattccttttttcagcgttaaccgttctttcaatatcagccgggcaaatacaaccataaatgcgggagtggatgccgtaataatcgcacccatctgcgcggttgataatttcgtgccgatttcctgcgtgacgatcgaaaccgtgttgccgatcaatccgatcgcagcgatcagtaataaatcacgtttatgaactttccaggattggcgtgtaaataaactgagaatcaaaagcgaaagaagcgccaccgcatatctcagccataccagttcaagcggcggaatgaccgctaccacaacttttacaacgacatacataccgccccagatactggcggccaatgccaaataaatcgaaccgaacaatgtatttttcaatttgatgcaccctccgttatcatattaggtcacgtcatatgccctaacggagagaagcgcagtcaccttcctccattaagggcggagaagtgctgccggtacatcatgttcaaataagggcgctagaaacatatcgtttttcacctcaattgcaatctgatttttctcattatacaaggtttgttaaaagacgtaaatgaacggcggcatcggctttatggattgcggacttgcagctggattcttgtgatctgattgtcaaacccgtccgccacaacctcatcaagcatatattcttcatatgcataatcgcccatttccagcccatactcttcaataaactgcatgatgctgcggtaagccgcttccgcttcatcccctatttggtacccgacggcataaagccctttcggcttgatatggaggtctctattctctatgccttcttctgtcttcatataaaaatgggtgtagttgtagaattcttttttcagaatctgctcccgcgcaaacagtccgccgaccggatgcccctgatcgagctcatgtacccgcatatagcggatcaattcggaaatggcggcagtatattgccgttctggcaaatggagtacgggtcgtcctatcataagtgtctcttcatctaatcgctgcaatgagacggaggaaaagtcagtctccaaggcttgttcggtcagcttcacctttgtccgaatcatcctttgcaggtgctccagctttttgattttgctttcgatttctgaagatttctcttttaaaagcgtgatgataccctcaggggttttgtctgttaagagcggtttgatctgcttcaagggaacgccgacctccttaaacagaccgatgacctgaaacagttcgaattgatgataggaatagtatctgtatccgttcgcttttttgatttccggagaaagcaggccgatctcgtcataatggaacagggtttgtttttttacgtggcacagttttgcaaattcacccgttgtgaagtattttctgacgtcttcgctcataatgcctccttgactatacggtaaccatatcctttatgatgatcattgtatccgagagaaggctgattcacaaatggcttacgcaatgaaagctttaccgtctcaaaaaaagcggaagaggagtatcaagtatgacgattgaaatcagaacagtcacggaagaaaaccgtgccgatatactggcgcttcatgtaagtgaaagccagacttcatttattgaaaccgcggaagagtgcttacaagatgctgaggattgccggcattatcagccggccggtctttatgttaacggggaattggtcggctttgccatgtacggatggtttccggaatatgatgaggaaaatgaaaacggcagagtgtggcttgaccgtttttttattgatgaacgctatcagggacggggattgggcaagctgttgcttgatgccctaatccgtcatctcactcaaatatatgattgcagacggatttatttaagcctgtttgaagataatgtgcacgcattgcggctttatcaaaaattcggcttcttattcaatggagagctggactcaaacggggaaaaagtgatggtgaaagagctgtaaaccctctgtataaaagcaattcggcttcttgccaataccttaaatttgaggtaacataaagatattagacgacggtcgacggactacggtcgattattaaaacctgatacagcggagcggaacatggtgatcaggcatctaaatggaggagaagattgtgcttattatactcgttatgtttcttctcgggattattctcgggtttatcggcgccgggggagccggttttgtcattgcacttttaactatactgtttcacgtaccgattcatacggctttaggcacctcccttgccggaatggctttcacaagtttatcgggggcattcagccactaccgtgaaggcaatattcagatgaaaatcggtctcatcgtcggcgtttttgcggcattcggttcgtttttcggggcaaggcttacttcccttatccccgcagatttgctgcattacttgacggcgggcatgctgtttttatctgctctgcttattttagtccggttatttattgtaaaagaaacacaagaaaattccggacagcaaagcaatctgaacatctgggtgaaagccgttgtactcggtgtcatcgcaggaatcttgtccggaacgttcgggatcggctctgcccctttcatccaaatcggcttaatgattcttttgcgcttatccatccgccagtcggtcggcaccaccatgcttgtcattatcccgcttgcggtcggcggaggactcggttatgtgacggaaggatttgtcgattatatgctgttggtcaaagtgctgatcggaacgatgtgcggcgcatatgtcggagcgaaattcaccaacctcgtaccgaaagtcattctgaaatcagccatctttttaacaccggccatcgccggtctcatgcttttattttaaactgaaacgggaggcggccgcctcccgttttgttctgttcttcatctgttttcgaagagctttttcagctttgcttccgtttcggtatgatctaccggcgtatacacactgcagcgcagatcactgttgccctgaacctgaaatgaagtcaggttaaagaccatttttcccgccttcgcgtggcggaactcaattaatacttcgggtgccgagctgacttcgctctcattccacagcgtatgaaattccgaatacgttttctccatttcttctataaactgagaataccacgtatcagctacatactggccgtaatacgttctgaaaatggcgatgaatcctttcacaaagtgctcccagttcacggctaaacttcttaattcttttctggaaaacaatagctctatgagattccgtttttcagaaggaatttgttcaaaatctaaaaacacgtgcgccgcagcctggttccaccctacgatatgacaccgcctgtccgagataatggtgggacaataacggagctcctgcaggatttttgaaagggacgggctgataaccgcttcttcctccgcagcaaacggctgcttcacgccctcctcaatggcaagcgcgtataaataatttctctcatctttgttcagctgcagcgcatcggaaacggcgtccaatacggctgcggacactttaatgtctctgccctgctccagccacgtataccacgtggtgcttacgccggctaattgcgcgacctcttctcttcggagtccgggcgttcttctccttgtgcccatcggcagcccggccatctgcggagaaattttggcccgctgcgtttttaaaaactctgagagcgcctgcaatcttccttctggtatcataccgaatctctcctctcttaccctggtatttattatactaggataatcaacaacttgtaataggataattgcgagttacaataaatacataccgaaggaggaatgaccatgaaaagagttgtgatcaccggaatgggagtgatttcacctctcggcaatgatgtgcatacattttggaaacacctgacggaaggaaaatcgggaatctctttcatcgattcgtttgatgtctccggctccaagacaaaaatagccggcaccgtccgtgattttgacgcagaagaaagatggggcagaaaagaagcgagacggcttgaccgtttcagccagtttgctttagcggcagcggaacaggcgcttgaaagctccgggattcagctcgatcagattgaccgtgaacgcctcggcgtgtacgtcggctcgggaatcggcggcatcacgactttgattgataacgttcatactttaaatgaacggggagcgcgaaaagtgagcccaagccttgtccccatgatgatctcaaatgcggccgccgctcaaatcagcatcagattaggcgcgctcggcccctcactttctcccgtcaccgcgtgttccatcggcaatacgtcgatcggggaagcattcaacgccattcggaatgatgacgcagatatcatgtttgccgggggagcggaagcggcgattacgaatttgtcattagccagcttcggcaatgcccacgcgctgtcagcgagaaacgaagaccccgccgcggcaagccggccgtttgacgcggatcgcgatggatttgtcatgagtgaaggcgcgggcatcttagtattggaatcattggatagcgcaatcggcagaaatgccccgatcctttgtgaggtgctcggctacggtgcgagctctgacgcctatcatatggtggcctcccatccggaaggaacgggcgcatacctggcgatgaaaaacgctttgaaaaaggcgaacgtttcagcggaagacattgatgtcgtaagcgctcatgcgacaagcacaaaagccggagatctttctgaaacattggccatcaagacattattcggggagcttgcgtatgatattccggttacggccaacaaatcaatgctcggccacatgcttggcgcggcaggcggcgttgaagccatcgctctgacagaaagcctgagacacggcatcatcccgccgacgatcaatctgcagcaccctgattcggcatgtgatttggactatgtagcagacgggccccgccatcaatcgttaacgatcggcctttccaactcattcggctttggcgggcataattcggcgatcgtgctgaagaaatatgaataacgggcatcaaaaaaaggagtgaatcatttcactccttttttgctttctccggttttgttgttaaggcgaaaaaagcgatggaaccgataacggaagtcgtgaacataattgcccccatcgggacggccgtcgcttcattcatccccacaagcggcgacacgatggaaccgagaagaagcggaagcatgccaagcagtgcgcttgcgcttcccgcgcggtgtccctgcttttccatcgccaatgtaaaggtgcttgtcagcgtcatgccgatcgtaatcatataaataaaaattgaaatcaccagtgccgccagcggtccgtgaatgatcgtcatgacgagcagaacggcagtcgccgtcatcgctgtaatcacgccgattctcaacaggcttttttcgtgaatgattccgccgaaacgcccgatgataaagcttccggtaatgatcgccagaccgtttatgccgaataaaacactgaatacctgaggcgatactccgtaaatatcctgatacacgaaaggcgttccggagacatacgcaaagctcccgccgtgaataaaaccgaccgtcagcgcataaccgataaatgaccgatccttcagcaggcttcccattgtccgcacggaatttccgatggagctcggaatccgcttttccggcggcagggtttctgtcagcttgagcgcaatgataagaacaagcaaaaacccgataaaggttaaaaagagaaaaatcgtatgccatgatgcaaacggaagcagtaaaatcgcgcctcccgtcatcggcgccaccatcggcgcgacggcggtaatgaccatcagcagcgagaaaaatttagaaagctctcttcccgaaaacacatctctgacgattgcacgggataaaacgagtcctgccgaagcggtgaatccttgaagaaaacgggcaatcactaatgtagtaatgttcggtgcaagtgcgcaaaacagagaaaacaacgcaaataaaaaaatacatagtaataacggttttcttcttcccttcgcgtcacttaacgggccgacaacaacctgtccgattgtcagtccgatcagacatgcggttaaactgagctggacaagcgatgcgcgggcgcttaaatcttcagcgatttcagggaaactcggcagatacatatctatattgagcggccccagtatcgcaagcattccgagaagaaaagccagcgcaagccgctccttaccggtcggattatgcagcatatcgttcccacctttcctttgtcaatctctcaaaacatttgtatattgtatcataattttttctttatttttaaaagttttcaaagggcataaaaaaaccaagggctgtaacagcccttgggtccgggtcacacggtaaaaggttttacgcgtgtttttctttaaatgcttttgcgtattgatcagccgctataatggcatccgccacgtcgtcagccgtcacgtcaaaagcggcatgaattgtttcttcttcaatcgtcgcggcttctgccactttcataatgtcctctttagatgcgtctttcaatttgatgtcttcaagtgtgacaggcagccccaagctgatataaaacgcgatataccgctcaatttcctcaagcgaacgtttttccagcgccaattgaacgagcgtgccgaatgccactttttcaccgtgggtcaagtgatggatttcaccttcaagcgcggtaaatccgttatgaatggcatgtgccgcagctaagccgccgctttcaaatcccagtccgctcaaaagtgtattggcttcaaccaccgcttccaatgcgggcgtaacggctttcgctttcacagactcataagcgagacggccgtatttgaataataccgcttcacatttttccgcgatagcctctccggcgattgtcggaattccgcctgccatcgttttaccgccattggcgatgacactgcgcgcctctatccacgtcgccatcgcatcggcaatccctgatgctaaaaagcgcggcggggcttccgcgacgattttcgtatcgaccagaaccaagtcaggattcttatgatagaaacgatagttttcgaacgcgccttgttcagaatacacgacagacagcccgcttgtcggagcatcagttgaagcggccgtcggcacgataacggtatagccgtttatttcatctgatacggctttggccgtatcaagcgttttaccgccgccgactccgatgacaatagtcgcgcctgctttttctgcgatgccggcaattcttttcatttcttcctgggaggcttcgccgttgaaaaccgcctcttcagaagagatattgcttttctttaattcagccgtcaccttgtggcccgcgatatcccatacggttttgtccgcgatgacgacggctttttcaccaacgccctccagatgtccgccgatcgtttcaatggcgttttttccctgcacgtatttggccggactgataaaaattcgttccaatgtcatcatcccttcttcgttgtctctcattacatttctcttattgatagagcagaaatgaaaactcttctgatatcattcctcgttttaaattgatttaaacctcatatacactgcagaaaaatcaattttcacggcattgacaagatgtgaaggtgtctatataatcttcgatattgaagctgatcattctttactgaatgaacaaacgagattgtgaatgattcgtcttaaaaattatttagttctgctggataatttttgaggcgtttttgttttttatatatttttgactgcagaggaggtttgcacatgaagaacatttgcaaggatatactgatgattatggccggagcctttcttattgcggcgtccgtggaatttttcgtcatcccgaatcatttaggggacggcagcaccgtgggaatcgctctcgtgttatattatcttttccatatacctgcaagtattacgactctggttgtaaatttgatttttatcgggctggcttataaatttttaacgaaaaaaacgattttatacacgatactcggtacgggaatgacttctgtttttctcagcatcgtcagctttattccgttcggcgtgcacgatatggtgctcgggattgtattcggcgctctgctgatgggagcggggctggcattgatctttattgctgacggatctaccggcgggaccacgctgttggcgtatttattaaattacacaaagggctttaacatctccaaaagcatgttttatatggattgtgtcatcattttcgcatccgttttagcgatcggcatcaatcatatgctgtatacgtttatattcgtatatctgtgcgccaaaatcgtcgatattgtcattgagggtttccataataaaaaagctctcaccattatgtctgaccaatacgaagaaatcgccaaagccatcacctccgagtacggcaacgcggcgacgattttttacggatacggctattacggcagcaaagacaagcgcattatctatgttgtcattaaaaagaacgaattgctgaaaatcaaaaaacatgttcaaaaaattgatccgaaatcatttatcgttattcatgaagtaaaagaagctgtcggagggcaattcgggtttacaaacctgcccgccgccgcaaatgaaaaataaccgcctgcagtgtatagctgcaggctttttttattcggctcttccccgctcaaaggttttttacatctttcaatcgaagtagtaaatgaaaccttttttgatggaggaacataaaaaatgaatatcaaaactgacaggctcgtaattcggacatttgaaccggaagattggcaggatgtctatgcgtacacctcaaatccaaatgtcatgaaatatataccagagggtgtctttactgaagaagatgttaggaaattcgttactgaaaacagcggtgaacatgccgggaagtttcccgttttattgaaggatgagaaaacggtcattggccacattgctttttttcagtattttggcgatcatacgtatgaaatcggctgggtgtttcacccggaataccagggcaaaggatatgcttcagaggcggcgcgcgccgtgctggcattcgggtttaacaagatgaaattacaccggatcattgcgacatgtcagccggaaaacatggcttcgcaccgggtgatggaaaagatcggaatgagacgggaaggattttttaaaaaatgcatcccccatgataatgaatggtgggacgaatattattatgccgttttagaagaagagtgggaagtctccaatctggaataaaaaggcttataccctttgcttttacagataagtgtgtgctacactgtttgtaacaaatacgaagggatgatgggtggacaatgattaactaatcttattttgaccgtttgaaatcaaatatttcaaatcagaaaaaataggattagtctgcccattttctatacgatacgaaagctatgtgaaaatagcttatttgatcatgcacaggtacggctaatccttccaaatcaattgggaggatttttttggtcctccctttaaagcgagggattgacatatgaaagaaatgttaaaaataagcggcatcagttatgaaatcaacagtgttcccctttttgaacagatcagcgcgagcgttcagcaaggtgacatcatcggcgttatcggtaaaaacggcgccggcaaatcgttattgctgcaattgatctgcaatcaaaaagcgccgtcacaaggacagatccagatgatgcaagatgtgaacatatatatggtggaacaagaaacggaagcttatgattccggccatccggagcctgcggaggcagccttgttagaaaagtggaacgtgcccgcacgcgccttttcgcaattgagcggcggagaaaaattgaaagcccgtcttgccaaaggtttctcctcctcaagcagccttttgttattagatgagccgacgaaccacctcgatcagcacagtttagaaatactgctaaatcagatcaagaattacaaaggcaccattatttttgtttcgcatgatcgtgcttttatagatgcagcggcgacaaaaatctgggccatcgaaggaaagaaactcattgaacataaagggaattattcaagctatatggaggtccgcaaacagagaaggctgacacagcagcgggaatatgagaatcagcagaatatggtcaaaaggattgaagctcaaatgaacgagctgagcgcctggtcaaaaaaagcccacgcccaatcaacgaaaatagaagggtttaaagaataccatcgcgtaaaagcaaaacgcacggacgcccagattaaatcaaagcagaagcgccttgagaaagagcttgaaaaagcgaaagcagaaccggttgaagcggagtatgaagtccgtttttccattgaacaccgcaaaaaagcgggaaagcgttttttagaagtaagggatgccgcaaagtcatatgacggccgaacgcttttcaaaaacgtgaatttcactgtgatgcacggtgaaaagatcgcgattacaggcccgaacggcagcgggaaaacaacattattgaaggtcatcctcggtcaggaaaaagcacaggacggcagcatatggatatctccgtctgcaaacgtcggatatttaacgcaggaagtattcgacctcccgcttgataaaacccccgaacagcttttttacaaagaaacgttcgaagcaaggggaaatgttcaatccctcatgaagcatttaggatttaccgcagcgcaatggacggaacccatcggcaagatgagcatgggagagcgggtcaaatgcaaactgatggcgtttattttagaggagaaagatgtgctgattctggatgagccgacaaaccaccttgatctgccgtcacgcgagcagcttgaagacactttggcccgatacgacggaacgctcatcatcgtatctcatgatcgttactttgtcgaaaagacgacggacatccggcttgatatctcaaacggcagcgtccgaaaacaatggaaagaatctccctccgtcagggacgatgctgaagaactgcgattgaagcttgaaaccgaacggcaggaagtcctcggaaaactcagcttcatgactccggctgataaacaatatcgtgagcttgatcaaaaattcaaagagctgacggaagaaataaagaaattgaaatgaatgaaaaacccgtgattgtcacgggttttgttttggaaagctcacgtatcatgaagaataatttcaaactgatttgtacaacctacgttcagattaattatgagcatggttcaggggggcgaagaatggccaaacgcattggaattacgggaaacattatggctgatcaatccggccctttcccgggttataatcgggcatatgtcaataatgattatattcagtctgtttctgaggccggcggtgtgccgtttatattgccggtgattcaagagacggcgcttttaaaggaacaggtctctcatgttgacgggatcattctgtccggcggtcaggatatagacccgctgttttacggcgaagaacctttacaggctttaagaaagacctttcctgatcgggacgcctacgagaaggagctgattctcacggcggttgctttagaaaagccgattctggccatctgccgggggatgcatatgttaaacgtcacttacgggggaactttatatcaagacctgacacacgcttcgtttgctgacattaagcatgatcaagaaaaagatccgccgttaaaaacccatcatgtttcttttgaaaaagggacacgtctccataccttgtttggcgattcagcgcgggtgaattcattccatcaccagatcataaaagagacggcgccttcgtttaaagtggcggcttatgcgaaagacggggccattgaagcgattgaacggacgggtgaattatttgtcgtcggcgtgcaatggcatcctgaaatgctgacaaaaaaacatgaagacatgaaaaagcttttttctcatttcatggatgcggtcagcacataaaaaaagcagatcaaaacgatctgctttttcattttattcttccggtttctccggtgttttgccttgtgtcagcttatggccttcgatatccacgttcggaatgattttatccagccacttcggcaagtaccaggccgcatgtcccatcagcttcatgacactcggaataatggtcattcttacaatgaacgcatcaaaaagcacaccgaaggtcattgccaagcccatggatttgatcgtagcttctcccgcaaagatgaatcccgcaaagacgaaaatcatgatcagtcccgccgctgttacgacaggtccgctatgtttcaatccggcatgaatggcttgtaccggattttttgttttgacatattcttctctcattctgctgacaaggaatacttgataatccatcgccagcccgaaaagaataccgatcgccaaaataggcaggaaggcgagaatcgggcctttttccggaatgctcagcaagccggtgaaatgtccatcctgcaggacgaataccgataacccgagtgttgcggtcattgtcagcaaaaagccgacaacggcggcaagcggcacgagaagcgagcggaaaacaacggtcagcaatacaaacgcaaacccgacaatgagaatggcgaattccgggatcgcatcgtttaaccggtctgaaatatcaatgttcaccgcggttgacccggtgacgagcaggcggatgccgtttttgtctgatcgtttccgtatatcctgcactaactctttcgttgccttatcattcggcccggtttcaggcactgccgtaatgatggcatagtcccctttttcgttcggcatggcaggtgtgacactcgccacattgtgcaagtccttcatttctttcacggcgtcttgaaatgcctcacttttgttccccttgaccccttttgcatcggcaacaattgtcagcttgccgttaaagccttctccgaatcctttagacaacagatcataggcgcggcgatccgggctgtctttcgctttcattcccgcatcaggcagccccagctctaaatgcatggccggcagactgatgacggctaaaagaatgatgctgaaaatgcttaacagaataggcttctttgtaacgaagcgcccccaggcattcgtgtcggcgcttttcttttctttcttcttgtatgatttcggaatcattcgttttcctgcgattgacaacaccgcaggcaccagcgttactgaagccaatacagccatcagcacactgagtgccgcagtcaatcccatggcagacatgaacggaatgccgacaacagtcaatccgcaaagcgcgacgatcacggtcagtcccgcaaaaacgacggcgctgcctgccgttcccgcggctttcgcgatcgattcatttttttgtacaccttcgcccaaaaactgacgatgcttcgtaaagataaacagcgcataatcaattccgacggccagtccgatcattccggataatgagagactgaccgaggctatcgtaaagaactgtgtcccaattaacgtcagcgcgacgcttacacctaacccgatcagggccgtgacaatcggcagccccgcgatgactaatgaaccaaacgtaatggccagaacgacgaatgccagcacaacgccgacaatttcagatacaccgccgatttcaacaccggcccccggcacatcgccgctgagctccgtctgcagacccttgtctcctgcggcggacagactgtgtttaatatgtgaaacagacgcatccgtaatgtcatccgccgcttttttgtacgtaatatcggcatatgccactgatccgtctttagaaatggttcctgtctcaaaaggacttgcaatcgaagcgactgaatgatctgttttgatcttctttaatgtctcttcaatcgcttgtttttccggttttgacgtcaatttcttcccgtcttcagctccgaaaataacccgtatgcttcctttatcgggaccctttgaaaattctttttgaatgatatcgatcgccttttcagaaggtgtgtcgggaattgacatatcctcaaaaaaagcaggttttaacgagatggcgatcacaatcgaagcgatcagtatcacgagccacgcactgatcatttttaatcggttgcgggcagaccatccacctaatttatataaaaaaccagacatcgaatactcctctccaatcattactttctgcctaattgtagttcacattcacataaaaaaaacgtacataggggcatgtacgtttgggcagtttttcattatatattcagtttcagaatgcctttttgcatggcaatggtgacggcttccgtccgcgaatcagcgcctaatttgttataaatcgatgttaatctcgcttttaccgtccgctctgagattcctaaatcgaaggcgatcgctttgcttttatgtccttgcgcaacggcttgcagaactatgatttccttgtccgtcagctgtgtttcattggcatttgcccgttccattttcagttcccggaaacgccgcaagatgtccggctgcagaagcacttctcccctgaccgccgcatccatcgtatgaaataaggtttctgagcttgtgtctttcagcagataaccgttcgcgcctgattcaatgccttctatcatcagatgatcttcattataggtcgtcaaaataatgatcggcacatcagaatgctcttttatctgtttaatggcttccagcccgctcatttccggcatgtacagatccatgagaatgacatcgggctttagttcctctgcgaggcggacggcggttttcccgttttccgcctctcccgttatggtgtaatggtcatttgtttctatcaaaagcttcagaccttctctgacgacaagatggtcatctgctattaacactttatacatgttccgcctctccttgaattggtatgatgatctcaatttgagttcccgctgatttggcgcttgttatacggcaagtgccgttcatcatattgacgcgttcttgtatcccaagcagcccgtaatgtccgctttttctcatttctgttccggcatcaaagcctttcccgtcatctttgacggttatgcggatctgtccctcttcttcctgaacggatacccagactttctttgcttctgcatgcttggcggcgtttgtcaggccttctccgatcatgtaatggcaattctccgccgtatgaacgtcaagcacatgatgcacgctgtaatctaaaaaacaagacagcccggaggcttctgtaaaatggttgatttgttcagtgatgctttcttttaagaacccgatcttttctgatgtgctgcgaaggttgtcaatggccgagcgcgcatcagccaatgtgcccttcactctgtccattgactggctgatgatgtctttcgctctgtcagtgttaccctttgaaagatgaacatgcaccgcttcaagctgcatatgcaagctgaccaatccttgagcaagcgtatcgtgcaagtctctcgccatccgctgcctttcattctgaagcgtcagctgtttcacttgccggtgagcgagctctaatttttcaagcgtcatctgtgtttttattttttcatcaacttgcgcgaaaaatgtggccgcatacgtgataatcacgatcatgatgggagcggcgataacgatgaaacgtagcagatgatgcggatgctcctggtgcagggctgctatggacattaaaatgaaaagatagagtatgagcagcgtttttcccttatccgccattccgataatctgcccgattaaaaaggcatagagaccgacgacaaccgcgatatagccgccggtcatcaagttagccgatgtatatatgataaatccctgtatgatgaaataaagaaacgtctttttcttcacccagcgatgggaatgccagtgcagcacggtaaaaatgacgatcaatatcgtgaataacagcagcaaaaaaaccgtccagctttcataaatgtactgcaaagagactgatgcggcatataccataaaaataaacgccagaccgggcacccgaagcgcaagcatatgcaatgaacgtctgtcacgggagacgtagtcttcttgatgttttgtaccaaacaatctctgtccacttccttttagccgaccggcctcacgaggttttattctatttgtcatcataccataagtgcctgcttctcaccttccccttctttcctgcatgacgggtgaaagaaaaaacagcctgcgggattgtttgcaagctgcttttttgttcatatcttttttatgacctttcccgggtttcagcgggctcgtctcccgcgcggcaaaaccgcccgcgcatcagaaaaatgttcatgacaccaacagccattccatgtgaacaagaggaagcgattgtgcttcctctttttttgatgcaccgtcaggctttttctccgctttttctgataaacaaaatttgtaagactagacctcttttctcaggggaaattaattacgtaattgagaagaggaggtttaaagataattatggaaaagcgtgaattagcggctcacgagtcgcttgacttacatgaaatcattaacttcaagacgctttgtgtcgcgaaatccaagctcatgcaagggcttgtgtttgatcaggatctgaaaacgttaatggaaaaagacgttcagcaagcctctcaagacctggctgatctgcaggcggtttatgaacgggcaacgtttcaggctcccgttcctcaaaaccggccgacttcgatcatcaattgaaaggaaggtaagcatcattgaatcatgaccatttagatccgatcaattcattacatgtccctgaacttgcggacatgacattcgcaatggattttctcatacgcgccaaagaaggcgtcagaaataccgccgtcgctttaacagaaaccgcttcacctgatgtaagagctttgctgcgcaaacagcttatgcagggaatcgcgatgcatcaggaaattacagacttgatggtcagcaaaaagtggtttcacccgcatgatctgagcgaacagtataaactggatcagctctctgcgaaaaataccctcatggtcggaaacatgaacctgtttcccgttgaaacgaacagaaaagggatgtttgaccgcacacctgatgaacactaacactggaggtattacagcatgaaggccgtaacgtatcaaggagttaaaaacgtcgtcgtcaaagacgtgcctgacccgaagattgaaaaacacgatgacatgattataaaagtcacaagtacggcaatttgcgggtctgatttacatttaatccacggactcatcccgaacttgcaggaagactacatcatcgggcatgaaccgatgggcatcgtggaagaagtcggccccggcgtgacgaaagtcaaaaaaggggaccgtgtcattattccttttaatatcgcctgcggagaatgcacttattgtaaaaatcacctggaaagccaatgtgaccaatcaaatgaaaacggcgatatgggcgcttatttcggctattcagggagtaccggcggctatccgggcggccaggccgaatatttacgcgtcccttttgcgaactttactcattttaaagtccccgaaacatgtgaagaaccggatgagaaattgagtgttattgccgatgcgatgacaaccggcttttggagcgttgacaatgccggcgtaaaagcaggcgatacggtcatcgttctcggctgcgggcctgtgggtctgttcgctcaaaaattctgctggttaaagggagcgaaacgcgtaatagccgtagactatgtcaactaccgtctccagcatgcgaaacggacgaataaagtggaactcgtgaacttcgaagaccacgaaaatacgggcagctacctgaaggaaatcaccaaaggcggcgccgacgttgtcattgacgccgtcggcatggacgggaaaatgacagaccttgagttcctcgccagcggattaaaacttcagggcggggcgatgagcgcattggtcatcgcgtcccaagcggtgcgaaaaggcggaacgatccagattacgggcgtgtacggcggcagatataacggttttcctcttggcgatatcatgcagcgaaacgtcaatatccgatcaggacaagctccggttatccattatatgccgtatatgtttgaactggtgtcaaccggcaaaattgatccgggcgatgttgtaagccatgtcattccgcttagtgaagcgaagcacggctatgagatgtttgacacgaaaacagatgattgcataaaagttgtactcaaaccttagagaacggaggctacagaaatggccagcgccttacatgaattactcgaaattcaggagatggcttcttttaagtcactttgtctgacgaaatccaaaaccatgaaagcgctcgtatccgatccgcagctgaaagaaatcatgcagcaggatgcggatacatcaacaaggcaattgcaggaatttgcctcaattttatctgatgcacagcatgaatgaggagatgaatgacgaatgaatccgattatggaatacttgacgggaatgaatgcactgacagaccaaattgtcgctatggatttattgaattcggcaaaaagcggtgtcagaaactatgcgatggcggcgacggaagccggaacgcctgaagtgaaagcgatcctcacccgtcacttagaagaagccatcgacatgcatgagcaaatctcacgctatatgatggaaaaaggctggtatcacccgtggaacacaaatgaacaagtccggctcaatttgcaaaatattgatacggcgctccgcctgcccgtcctataaatcgttttgctgctgagactgcacccctgactcaagcttcagtattttaaactgtgagctgccttttacagctcccaggcggctctcagtttttttatgccttcttgtatatcggtttcagaaacccccgcgaaaccgagagaaactgttttttcagggagctgtttttgataggtgagagacacgggatagattttgacgccttgttcctccgccttttcaatcagctctttttcgctgaaaggcagctgaacgtcaagtaaaatccgcagcccggaattttctccgcgaatcctgacgtattgtcccagctcgcgccgcacggcctctaataataccgctctttttttccggtacagctttctcattctgttaatatgtttctgccactctccgcttttgataaattgagccagcgtcagctgactgtggcaggagacggtctgtttatataaagaagcgatttccctgcctttttcgataagcggcaaaggaagaatcatatagctgatgcgcagcgaaggaagcagagattgggaaaacgtccccatataaatgacacggtgatgctgatcaagcccctgcaatgatgggatcggctggccggtgtatcggaattcaccgtcataatcatcttctataatgaacgattgatgttccgccgcccatttcagcagctgaatccttctgtttaccggcataatcgttcctaatgtaaattgatgagaaggcgtgacatatacaagacgcggccgctcttcattcagcttccggatacagactccttcatcatcgacgggtatcggaatgatcttcatgtgattggctttaaaaatctccctcgctctcggataacccggatcttcatatccgatggatagatttgcttcaaatattttgcacagcatttgcaaaagagcagggttcccggcgccgactatcacttgttcaggacggcaattcaccccgcgcgactgatataagtactccgaaatgagcgttctcaattcaagctcgcccaaatcatccccgggccgatacagctcatgcccgtattgatctaagcttgcaaccatacttttgcgccatgccgaaaacggaaaatgagcggcatccacagtgccgtagtgaaaatcaatccattggcggtcttccttcgcctttgtttgaacaggcgaagcgcccggctttttcacatagacggcgtccgagtcataatcggcaaaccatccgcttctcggcttactgacaatatagccttcggcggcaagctgttcataggcacgctccacagtcgtctgactgacggaaagctgacttgccaaaagcctttttgaaggaagcttcagtcctttaggaagacggccctgatgcatattttccttaaaatgccgataaagctgctgataaagcggaatatccagatctctatttaaaaatggcgtgatatccatttttgctccctccaaactggcattcttctttttataaaaactggccatttgtataaggccaatttcagtttatagtcattataaactttgaaaatgggtttagaaatatatattggagtgattggaatgaagaaagccgcaaacggctggattaacggatttatcggcgtgctcattttcagcggctcgcttcctgcgacccgcttggctgtagcgaactttgacccggtttttctcaccgtatgccgcgccgcgatagccggtatattggcaggcgctctgctcctcatttttcaggagaaacgccctgccaaaagcgacatcatttcactaataacagtagcgctcggcgtcgtgatcggtttcccgctgcttacagccttagcgcttcagcatgtcacatccgctcatgccattgtctacatcgggcttctcccgcttgcgacggcgatcttcggcgtactgcgaggaggcgaacggcccaggccggtcttttggattttctcggctgccggcagcatcctcgtagccggatatgctctgctgcaaggaggagaatcctctccgctcggtgatacgtacatgatcgcttcgattatcgtgtgcggtctcggttatgccgaaggcgcccgcctctcccggcggcttggcaactggcaggtgatctcttgggcactcgttttatcgcttccccttatgttcatcctgtctttctgcttcatgccggactcatggtcaaacatcggcgcgcccgcactgctcagtcttgcatatgtctcaatattcagcatgctgatcggcttcgtattctggtatcgcggactcgcccagggaggcatcgccgcggtcggacagctgcagcttctgcagcctttcttcggactgttactggccgccatgattctccatgaaaaagcaggatgggaacttgcggcggtgaatgccggcgttatcgcttgcgtggcggccgcccggcagttcgcaaatcaatcagaaaaggccgaacaatgaacttgttcggccttttcattatattccgcccgtaggcagcagaagtctgtatctctttcacatgatccggctatttttcaggcaggctgaactcccttaaacgcactcatcactagatcatgcacataggaatcattcacctcatcacctgtaataagcagacgatagaaaatcggtccgtaaatgagatcgatgcttacgtcaatatcaagattctctcttaattcacctttttgaattcccttttccagaaggcctttcgcttggaggcggcggggcttgaaaaatctcgtgcgatattcttccgccaattttgcatccagctgccccgcaccgattaattccttaataacggttccttcccggctcgtcaaaaaccttgctaaattcgtggcgtgggtcaatatatcttgcactgttgatcctgtatcgggcacaggcagtctgtccgtagcggtcgaaagaaagctgtccatgataacggcagccttgtttgaccaccatttataaatcgttgccttacttactttggcacgctcagcaattttatcgactgtcaccgcgtcaaagccattttccaacaatagatcataggctgcagaaagaatcgccttatgtgttccttcatcgcgcggccgtcctcgtttactctgcacatgaatcattccttcccgaattataaacgatacgttcagtatacttaacctgtataaaaaaagaaaacagaaacctatttacaaaactgaacgtttagtatatcatttgcttataatgaaactaaacgttcagtttataaaataacttgagggaaatcttgatgaaacatagactcccaaagcctctgcgtaaaggagatgaatcagcaaatcatttatcaaagcatcataaaaaccacttaaaaaggagttcattcatatggctaaagaaaacaaacaaacagcagatcagggaatttcacctggtttaacccttcttctcgcaacggcatgcggtatcattgtcgctaatctttattatgcacagcccttggcaggattcattagtgcggcaatcgggctttctccaagcagcgcaggattgattgtcacactgactcaaatcggatacgttgccggcttactgtttctcgtccctttgggagacattatcgaaaacaaaaaacttgtcgttgtatcgctccttctaagcgcagccgctttgacactgacagcatttgcgaagcatggaacactgtttttagccgctgcgtttttcatcggactgggatcaattgcagcccaagtgctagttccgttcgcatcataccttgcaccggacgccgcacgcggccgggttgtcggcaatgtgatgagcggcctgctgctcggtattatgctttcccgtccgatatccagtctggtcgctgatatatgggggtggaatgccatatttgctttatccgccgcgttaagtgttgtcctggcaatcgtcttatcaaaagtgcttcctgccagaaaaccaacagcaaacacaagctacaccgtcttactcggttcaatgtggaagctgctgcgcacgactccggtcttacgccgccgtgccatttatcatgcgtttgtatttggcgctttcagcttgttctggacgactgtacctttattattgtccggtcctgcttttcatttttctcaaaaggcaatcgcgctgtatgcattagcgggcattgcaggtgcagcggctgcaccgataggcggccgtctggctgatcgcggcttgacccggcttgccaccggaatcgctctcggtgttgtcatcgtttctttattactcccgctcatgattcaaagcagccctcacgtcggcatagcagttctggtggccgcagctatcctgttggatatgggtgtatctgccaatctcgtactcagtcagcgtgccattttttcgttggcacctgaatttcgcagccgattaaacggattatttatggccatcttctttctgggcggtgctataggatcatcaatcggaggatgggcatacgcctcaggcgggtggagtatcacattatggattggaatcgcttttccggtcatcgcattgctttatttcaccacggagaaataagcctttcaccaaaaataagccgtcaggaccaagctgacagctttttttgatgtattcttctttacatccttcggaacaaaaaacccctgtttcatgagtaattttgcttcatgcggttccacattctcaccgttaagatcgtaatcaatagaaacgaaacgattactaacacaatacctgtcattgactcactgaaattgataacgacaaagctggacaatagcaccataggaatatttgaaatcaatacagttaacatgtaggcagaataccttaacccgattgctgccgataaaaaacaaatcacatccgtaggagctgccggacaaatcatccccaatgccaaaaacttataattgtacgcctccaataacactttcaagtcaggatatttatcttccagtaattgagtcgttttttcgctggcgaatttccttgaaaacagataaaccaacgtttcgcttataaacaggccggccattgataataaaatgctgaccatcggatcaaagcagattccgcccaaaaacatcagcgtcatgccgggaataaaaaagagaagcctgacgacccacaaagccaaaaacagcagcatcgcgtattccgcatgccctgatataaagtccgttacatcattcatatcaaatgacagcaagtccagttcctccaaacaataaacgcctaaaaaccatatacataataaaatcattttatttttcaatttctccactctcctcgctttccatcacatcataagcaaagaaaatgaagaaacagccggtaaaatccttaaggattcttaagttattctaaaaaaaagcttacggacgtttgtcacgcaagctctagtcaatcgggtgttcaacagtaaaacgaagccagccgccgctgtaatccgcatggatacggccgctgtgaagctcaacaattctctttgaaatggcaagtccgagcccggtgccctgatgacccgttctggccttatcccctctgaaaaaccgttcaaacagttgatttacatcatcggaagggacattctcggccttgtttgacacttgcagaattgctttttcatctttcagctcaaggtttatgaagaattcagatggtttgatactgtactttaacgcattcataaaaagattatcataaacgcggaccatcttttctatgtcgatacatacaggaacatgttcttccgtaattgattttcggacagttaatcgttccttttcaaacatgggaatgtactctccggtgatttgttccaatagggcagacaagtctgttttgctgcggttcaaagtaacatccggactcgataaatgtgtatattcaaacagttcatctattaaatatttcagcctttgcgattttgaataaatcgtttcaaggtactcctgaaattgggctttactgttgtattgttcttttttaagcagatccaaatatccgataattgatgttaacggggttcttaaatcgtgcgatacatttgagatcaactcacttttcgctcgttctaattctctttcatgttcaaatttactctctaattcttcggacatataattgatatgttgtgcaagctgtgtcaattcatccctgctttcagtcctgatggtcaagcctaaatttccattggcaatatggtgaacactctccgtaatgtgtttcaaatataatatttttttccgcaccaataacaaaaaaaccgcaataaaggtcaaaatagctgcagtaaattgaatcagtatcctaaaattagcgtttccttggctcacatctgttaaataatttattttgtacagatatgagatagataaaataacaagaatcaacacaccaaatgcaacaagataactaattgcgatcgcgatcagaagcctgacaatcagcttatttccaaacttcctcatattttatatcccgttccccataccgttttgatataaatcggatgtttagaatcctcttctatcttgtctctgatctttgtgatgtggaccattacggtattgtccgacttaaaaaagtcttccttccataccgcctcatatattttttcaacactcatgacaattcctttgtttctcgaaagcagctccagaatatcaaactctttcggagtcagcctgacttctttctcccgcacccacacctgccttgtatccgtattaacggtcaaatcaccgatttcaatgacgttcgccgtgctgatcgtatctgtattgtattttttataccttctcagctgcgatttcactctggcgatcaattccaatgggttaaacggtttcgttaaataatcatctgcgccggaggccagtccttgaattttatccatatcttccgatttggcggaaagcatgatgatgggcagatttcgttcctgtctgatcttcatgcatgcttcaatcccatccatattgggcatcataatatccaaaatgatcaggtcaaactccttttgctccaataattttaatgcttcagcagcatcttccgccttctgtgtgtctattccttcattttctaaatagacagagatcaggtttctgatatctttgtcatcatccacgataagaatgcttgtccccatatgaatcctccctcgttttttgcggcaatgaacagctgaaaacataagccggcggaatattcctgaattctctccttacttctgttttcggaaagaattgctcaatcaatgccttcttatattgagtatattggaacgtaatgaattctccgttatcttttaagattttagccgtatccgtcaaaatatcagcagacacttttttcggaaggcttgcaaaaggaagtcctgagacgacatagtcggcataagggattccatgctccttcatatgactctcaatatgttcagccgatccatgtacaataaataggttctgttcctctttatatttttcttgcagcaaagcataaaattcctcattttgttctatcaataagattattgttccgggctgccgcttttcaagcagcttttttgtaaatactcccgtacccggcccgtattcaacaatgtattcagctttatgaaaatcaatttttcccatcatcttctcagcaagaaaacgcgagctgggcagaacggcgccgacagatctgggattcataatatattgaaataaaaataacagacgtttcatctttaatctctccatttgttttgaatttataaaacacactctacattcaaaacctgaagaaaaagcggtgaaagttcttaagaaatcttaagatataaaaaaagacggcgggatttgccgtctttttcagctgccgattctttcagcagcggtaaaaccatgtcataatatgttaagaaataattgcgccataggcaggtgaaacacatgaagaagtatttatataaacaccttttgtcagctctcgtttcgtccgtttgctttttattggtcttttatgtgggtttaaaaatgacacaggaagacacaccgccgttgtcttcttacccgttttacctttttatttatctttacatcgcagccggatatttgacggtcggccttgttttagcttgtatgactgatatcttgaagaaccgctggacattcaataaaccgtctaccattctattgaaacttatcgtttacttactcataccgtatgctatttttcattctttcttcattttaatggcgccgttgatttatgtgctgtttgagtcgttattcatcctgagaaaagcttcataacctgaaaaaacataccgcctgctgccggtatgtttttctgcttgtcagttgttcgcagtgatctgtttgatgttttcttccatcaagccggaaatgagctgttcgtttgtatgaggaatctgtttgagctgttgtacgaccagcccttgtcttgcagcagaatgattttgactcagctttgctttcccctctattttgctgattttgattttaaaaccttttacccctttgttcatgcctgccagcaatttcgcatcgacatcctctaatttgtacgggctgtcggggctttcgtatttcaatacgagatcactcatcgactgcacggtttcttcctcatccaaaagctccgcctctccgtaaacatgaaccgccacataattccatgtgggaacagcctgattcgtctcataccatttaggcgagatataacaatgcggcccttgaaaaacggctaacacgttttggccatcaatctctttccattgggggttcggcaatgcaaaatgaccgtataagcattcgttattcttactcatcatcaatggcaggtgggttgcatacggcatgccttccgccgttgaaaacaatgctgcgaaaccatactctttgataacatcgcacgcttgagcttcactcagctgaaatggagcgggaatatacatacaaaactctcctctcgaacatggattgataaagcgctttccgctataataagatatcacctgacatttaaaaaggtacagttaggaataaatacacatgtcagaggagaacatctgatgaaaaatatgattttcgctttcgaaagcgacaccccgaaatacaaacaaatttacgagcaatttaaaacattgattgagcagggaaatattcaggcagatgagcggctgccttcgattcgggagctggcagattccctgcgggtaagccgcaatacaacgctgatggcttatgatcttcttttagcggagggatacattcgcggagaaacacgcaaaggttattttgtaaatgaagtagaaccttctatatttcaaaaagaaaacgatgttgtttacgctgaaaaaaccgaatcaactcagccggtcctgattgattttcgcgccggagccgtcgatcaaaagcattttcctctgaaaacatggagaaaattatacaatcaagttttgacatcagagaaaagcttcctgtacggtgaaccgttcggcgagagagacctgcgtgaacaaattgccgcttatctcttggaatcccgcggagtgaaaacagatgcggattccattatcatcggcagcagcacgcagcagatgctgatatatctcagccggattctgaaagaggatttttcgggaatgatcgttgaagacccgggatttgacggtgccagagcggcttttcaatttcacgggctatctctggaaacgatgcctgtctatgaaaacggagctgatttttctcaattacatgcaatgaaagaaaaattaatctatgtgaccccatcccatcacagcccttacggcgttagcatgtccattcagcagcgccaaactctgatcaattgggtgaatcatagagagggttatattcttgaggatgattatgacagtgaattccgttatacacagcagccgtttcccgctcttgcttccattcaatcagaccgggtgatttatttagggaatttctcaaaatcctttcttccgggcatccgcataagctatatggttttgccgcagcgccttttgcaccggtataaagaacggtttattcatttcgaaagcaccgcttcttcgcttaaccagctgaccatggctgaattgatgaaggccggtgaatggacccgccatattaagcgcatgcgcattgtttacaggcgaaaaatgcagcacttgatttcacatgtaaagcagcagttcggcggtcatgtgacgatcatcggcgaccagtcgggattgtatatattggtgagagttcacctgaactatacagaagaaacattaatcgaacgcgcttttcagtacggagtgaaggtatatcctaccaccgtttatttcgttgccgaaaaacccgaaccgccgatcataaagctgggtttcgcccatctcgatacggatcagatcacacatggcgtacagcttttgagaaatgcttggctgtcatgaaagaaaaaaggcgccgaacggcgcctttttttatttcgtatttcttgtgaatttcggcagtccaaatatgatggcggcgatgccgcagattccgatgaaaacgggatagaaagagtatggcaggatgctgactggtgaaatattcccgaatttcccggctgataacagctgcgcgccgtaaggaatcaatccttgaatcatgcacgaaaagatatccagaatacttgccgattttctgttgtcgatgttgaatttatcagcgatattctttgcaatcggcccggctgcgataatcgagatcgtattattggccgcagccagattcgtcacgctgaccagtccggcaatgccggcttcggctccttttttcgaacggattcgtttcgtgatgaactccagtaaaaagtcgatcccgccgttttgtttcatcacgccgaccatcccgccgatcagcatggacaggatgatcagatcgctcattccggcaattccatccgtaatcgccttaaaataagagtcaagcgtcaggctgccgcccgctaatccgatgattcccgtcaaaaccaatccgccgaatatgacagccatcacattaataccgattaacgcaaaaaccaacacggcgacataaggaagcaccttaatccagttgtaagattcagcacccgtatggccggcgtggcctgccggaataaaaaataagataataacagtcacaatggcagcaggcaaaacaatcagaaagttcgttttgaatttatccatcatttgtgttttttgcgtccggactgacgcgatggtcgtatcagaaataaaagaaagattatctccgaacatagctccgccgaccacagccgccatcgtaatcgcgccggagatgccaagctctccgctcaaacccgcgctgatcggcgcaaccgccgcaatcgtgcccattgatgttcccatcgatatagaaataaaacaagcaatgataaacagccccggcagcaaaaactgctgcggaataacgctcaaagcaagattgacagttgaatgcaccgcccccatcgcttcagccgctgaagcaaaggcacctgccaatataaaaatcataaccataatgataatatcaggatgtcccgcaccggaagcgaaccattctattttttgattgagcgatttcttccggttaaataacagcgcaaaagctgacgcaatgatcgcggcaatcaagatcggcaatttataaaaatctccggtcaccagaccagagccgacaaaaagccctacgaataagactaaaggcaataacgcccaagggttctttttattgttcatctgggtaaaccacctcttttcagcattaaagtcgctaatcacagtctaagcaacatttcacactttaaaagtctgcagtaaaaaagtcaagctgaaaaaaggataaataatgattgataagatagaaaaagctgttttgtttccactctttagaaaataaaaaaaccaaggctcgtttcccttggtacatttcatgcggccccgcgtccgggacaacttctcttcattcagaaatacattcagctttcaatctgtttttaagtttcgcttcattttcaaggatatcttcgtaatcctcaatcttcctgtttaatcgttttatggtttcatcaatttccctctgtttctccgtcagccttttcctttcatttatcaggatgttttttcggggttcgatcgtatgatcggctccttcaataaataaagcggtatattcaatcagcgcctcaatcgacagcccggcacttctcatgcattttataaattgaatccaattcacatcatcttcgtcataatcgcggatgccgctttcatcgcgttttaccggaggaatcagtcctatactttcataatacctaagcgttgcggctgataactcaacctgctttgcagcctgcgcaatcttcatatttttaccacccgtccttcatacctttcataagcgtgccattatagaatatcatttcataaaaaaataaaccaaactccttgacttaaagtccgctttaacatttaaagtaaaatcgaacagaggattcatcactttatcttggaaaggaagataaccatgtgcaataatcatccgactcgtgtattaagcgctccgcatgcaaaagctaaatttgagcggacaacgattgagagaagagcattacggccgcacgatatcctgattgatattaagtacagcgggatttgtcactcagacatccacagtgcattcgatgaatggggcggcggaatctttccgatggttcccggacacgaaattgccggagttgtggaagccgtgggtgaagaagtcaccacatttgccgtcggagaccgtgtgggtgtcggctgttttgtagactcctgcggagaatgtgaatactgccttaacggagacgaacaatattgcacaaaaggcgttgttcagacttataataacctggactacgacggaaaccctacgtacggcggctacagccagaaaatagttgtcactgacagattcgttgtccggattccggatcagctggatttggatgctgccagcccgctattgtgcgcgggcattaccacctattctccgttgaaacactggaatgccggccccggcaaaaaagtggcgattgtcggaatgggcgggctcggacatttagccgttcaattcgcgcacgctttaggcgcagaggtcaccgtcctcagccgctcaatgaacaaaaaagacgaagcgcttgaatttggagccgatcattactttgcaacaagcgatccggatacatttactgagctggccggacgatttgatcttattttaaatacagtatccgcgaaccttgacgtagatgcctacttatccctgcttcgcattgacggtacattggtaaatgtgggagcgcccgctaagccggactcatacagtgtgttctccttaatcacgggccgccgcagcattgcgggttcactcgtcggcggtattccgcagactcaggagatgcttgatttcgccgccgagcacggcattgctcctaaaattgaagtgataccggccaatcaagttgacgaagcgtacgaacgggttctccaaagcgatgtccgctaccgtttcgtcattgatatttcaactttataatcgacataaaaaaacataccaatatttgttggtatgtttttttcagttcaaattattttttatttcagcagccatccgggcaccgcttttatataaaccaattcgcctatcaattcaacaatcgtctgtgtgacgataacagcggcggctaatgaggcccaagcatccggcagagccagcgctaacggaaggactgcgagagaatttcttgtgcccgtgctgaagatcaatgctcttccttcacctgtatccagacggaacgcatatgcaataaaccgggagacaaacggcataatgagcaggaataacagatagatcggaatcacacgtataatgatgccagcatcactgatgaccttgccgatttgtgtggcgacgaccgccaataagaccagagccataaaaggaacaggcagccacgccgtccattccaacaccttttctcccgccggcttcttatcagcccataattgagtcatcaccgccgccagcagcggcactgctattaacaataagaatgcttccagaaacggtcccgcatgaacagcccctatcacttctttcccgataaacagccacaggtataacggaagcaataccatctgaacggcgaacaaaaccggcgtggaagccagtattaatctctcatttcctttgccgagctgagtaaagacgatgacgtaatcaatacaaggtgtaagcaataccaaacaaacccctgataatataggaggagattgaggaaaaatggcggttaacacccatacaacgacaggtacagctaagaaattaccgatcagtaaagccgccataaacttgaggtttgacatggcttccctcagcttcaagaatgggatttgggcaaacatggcatacatgagaacagcgataagcggtgatatcgtccatccccagcgaagtcctgaatctttcccggcgatccccgctattccgccgattacaagagtcacaccatatatccaaatttgctgtttttctaatgtctctctggttattttcattggctgacacctcttctccgcccattataccttcttttctgccgctcttgcattatggttctgccggaattaaaaaacaccaagggtctgtgacacttggtgtttttggaacgcggccgagaaaaacaggttgaaaaccgttaatccttgtaaataacccccaaaaagtatttttgacatactgttccttatcgaataaaagcattctctttcatttccaaagcatcatccagccatctcgggtgcatcggcaagagatgttcaggtaattcatggatatcaaaatatctgatttccatggcttcctcagtggactttttcaaagtaccgccgatgacgtcacattgaaaacaattggtaataaaatggctgactctgccgtcagggtatataaaggtttgtgaactcggatcagaatagacgcctatcattttagagactttcaccactaatccagtttcctcttctatttctcttataattgcttgttcaactgtttcaccaggttccacatgtcctgaaggaatgccccataaaccattatcagcacgcttcattaataaaacggaacttgattctttaattataattccagcgactccggctttcacttgttctgtccattggaaatccggttttttacgtacttctgcctttatttcattatcgaacaagtctttcagatcgcggatcacaacatccggatttctaaaatcatgttttgcaggaaataaagtattttgttcagaaactaatacggaagtgatgcctatttggtttgctccgacaatatctgtttcaggcgtatccccaatcataacgcatctctctttatcttcaaaagactcgagtactttttcaaatattgaagacgccggttttccaattataatcggctctttagcagctgctgttttaacagccgcgactatagcgcctgtcgcgggagctggtccgttagcggcaggaaatgttttatccccgtttgcagcgataaatgaagccccgcagcggatgaggtttactgccttatacacatcctgaaatgtaatattttgatcccatccaatgacaacagcctccgcctgatcttccgtaagatcaataccggccttttgaatttcacttttaagttggtcatttcccaatatatatgccttctttattccttcactgacaaggtaatcagctgttgcccaccccgcagtaaacacttcatcaatacttgctgaaatccccagtttatgaaggcgtttcacaatcgtttctcttgtaacacaaggatcattcgttataaagcgaatggctttcttttctttacggagtcgttttaaagaggccacagctcctggtaaagctttatctcctatatatatcactccgtctaaatcaaataaaaatacatcataattctcggagatcatcataacactccttaagcggttgtctcttggttaatagttgagcgatacgcaaaatgatttgtagggccttgtcctttcccgattcctaagggatgtttaatggctgctgaaatgaattcctttccagttgccactgattccggtatgctgtgctgctttgccagctctgcagttatcacagctgaaaacgtacagcctgttccatgagtatgctttgtatcaaagcggggagaaacaaattcctcgaagtcctcgtcaaagtacaaaatatcacgggcttctccgttcaggtgccccccttttacgacagcactttttgccccgtatacctccactatttctttcgccgcatcacgcatctgctgtacagtctcgattgattttccgatgattacttccgcttccggaatgttcggtgtaataacagttgtttggggtattaataatttcttcaaataatcaatggcgtccttatggagcagatgatgtccgcttttagcaatcataaccggatccatcacatacgattgaatatttgcgtcttttaacttttctgccagcaattcaataattcctatacttgcaagcataccggttttgacagcatccggttttatatcatccatgacacagtctatttgctgagatatattctgaagagacatctcctcaaaacttttcacaccaagtgtgttttgtgcaacaactgatgtaataactgccattccatataccttttgttcctgaaatgtttttaaatccgcgtgaattcccgcccctccggaaggatcagtcccagcaatcgaaagcgctttataaatatccgtcaacttacactcctccttcaggcaggtttcactgctttaaaaatgacaaaaggcggatattccttttcacatttccaattattaaattgaaactctttctctatggcttttacatgctcttggtcaatatcgtttaacgttggttctgataaagttacattttcaaaacctgcatgagttaatagtttataatacattgacttcggccaatgaaaatcatttaaaattaaatctgcttgtccgggaacatggagccattcatttctatcttctccgtaagaatattctttccccggtattccattgcggaaggttgaaaattcaattccggttgaatcaggattcgtatcgagtatgacaaatgaagctcctggttttaacacacgaaaaatttcatctatgatacctttgatacgctggtcactatccgtattaataaaaacataacaggccattgcagcatcaactgagtgatctggtaagaaggaaagattatcgtgttcaattaaatgatagtccacatgaggatgttgtctttttgcctttgctatatctaacatcttccttgattcatcgactgcgatcacattgcagcctattctgtcagccagcctataagctacctttcctggaccgcatccgaaatcgagcacctttttaatctccgctttatcaaaagtacgaaaaacaaactcaaaacctaacgtttgttctaaaacgtcattataagcatcgaatttaccagcaacactgtcttctttccatgaagttttcattgaatttcctccttttgctcagttgagaaataatgaaaccacttattcctgacgaaaaattgatatataggaagtaaactttgaaatagaaaatgatccatatcccgtttatatgcaatatgctggtatatactgaaaaggaaaagaatctgtttccagtaatcaggtaaatcaagcatttcaatatcgtttttagtcatagaaatttgatctttcctaagtaattcttcgtactttaagactgtttcaatggacggccagttatttccctcaggcattttcggaaattcaaattccggaatatcatggtgattttcagcttcttcaagcaccgttttcgcccattcatgatctgaatcataaatatggattgatcccgcattatgaaaatattctccgacttctacacgcagttctctggccattaattcctgcatgaaggtaaatgagaaaagatcactgatcatcccgcgaaaagcatcatttgcacgcatgacagaagacatgtataattcgccttccctcacaaaaaactgcaaaccgattgtgcaggaaacatctatattttctaaaacgaagagttccgaagcatcgaatatttgaataaatgccctttttgaatcaatatcttcttgtgtcaaaagattttttattctattccattgatttagttttgcatttccgaattcaaatattttaggcccgtacgcagtgcctgttaatgtttttttattcattgagtatgaaggcatttttttattgtaataactgataaaatctaagtcgttactccccgataaataccatagcacttcagcaaaattaaacacgatattggtttttcttgaggataaataagtgacacgttctattggattttccagagtcagatggtagttcaattgttctctgcttttttgtccgcgcggtgaattgaaaaattcagggttgtgatagatgtcatacagcgtttccgtatatgcttcatgaaaagttctctttctcattgagattccgccttatatgctgcaaaggtatttttaatgttctctaataaatcatctgtatctttatagctgatgtactcaacatccgccactgcatgtaacccttgaattaagaaagcataatccttgtccttttctagaaatagcacgatcttttttttcaaggcggaagcccatccaatttctatatgtgttccaggagaagcgggtgatccgggaaatgctgcaaaaaggtcgcaagtacttatttcatcaaaatcaattttagtgcattgaaggggtgtcatgaaatctttcccccacccttcccgcttgtgagcattatgaaccagccatccttcattctcaaaaaaggaaattaatgattccagctttcccctctcatacgcactcatcaatccagttttctcatctactaaacttttaaaaggccctgccagaaaaacttttttagtcgccacttcatatcaccctttcaaaataaataaagccactttcctctatggaaagtggcttaaatatagataagataaagaatctctctaatttttcacttccctacgctggtattaaccaaatcaggttcaaagggtcaggacgtattgtctcttctcagctattaaagctcccctagtgactttttataaatatttactttaattctatgctattccatataaatagtcaaacaatgactttcccttcaatattgcagcttacccactagttttaaaaccttccggcctcttttttcctgccaacgaataaggtcacggcaacactcgctgaactgaccaaagtccccagtacggcagcaagaattgtcaaaaagccattggggatcagaaatccaatcggaatgagccccgcaaacgtgaggacgataaaacattgatagactccggatatgattctcacaaccaaactgccaaaaaaggacatgacgaatggaggaatgaacaaacataagatgattccgagtgagatcaataaaatcataggctcgtcaaaagaaatgacacgatcgccgggagactcttcagcagccgcgaatacagcaaatatagacattatcagtgtaagaaaaacaagaaaaaaccttttcagcaacgttatgactcctttttttataaaaacgggtatctttttttcaatcacaataaccattttatgttattaaatgaaataatatgaagtcaaaccgagttctgcacctgatttattggttcttatttttttgataatttccatataattgtccgcaagcagcatctatatcaatgccaaattgacttctgacggtcacgttaattcctgctgactttaattttttatagaagtttacaacttgtttctcatttacttcttcaaatctcataggtgaactaacagtcgggttatatctaatgatgtttacatggaacaagttccctctcttatatctgcttcttaaaagatttactacttcattcgcatgatcaatagaatcattaactcccggcagcataatataagcaatataaacttttcttgaggtcacacgtatatgctcatctaatgtgtccattacctccaataacgggtagcgttcattaatcggcattaacttgcttcgctgttcattaaaaggagaatgtaatgaaaacgtcaggttgacctgcggataatcctgagtgatttttttaatgcccggaataatacctatggtcgaaatagataacctgcgagggcttaaagcaaacaacttcggatttgtaagcacatgtaaagcatcaaaaacttgtacattcgctaatgcttctcccattcccataaaagaaatactgtcaattgaatgtccttttaagtgaaagtacaaaatttggtcagtcatttcatctgacgttaaattgcgttttaaaccaatatctcctgttgcacaaaatttacagccaaaatgacagccgcactgcgaggatatacaaaatgactcccaaccggctttatatttcatattaaccgtttctattttttcgtctcctgaaatttcaaataagacttttgtaacttgctcagaatgctgcacttttaaaggagcaatatttaaaattgactctccgaactcctctattaacaattttctcaaggatttaggaagaaccgttatttcattgaaatgatttattctcccttggaatacagcatttttgatttgattcattctaaaatcaggaaatttattttgcttcaggaactcttgaattcttatatacttgtttttttgttgcatgttttctcatccttccataatactcttgtttgtttgagtaaatagaagggagtgatcatctaacctttttttaaaatcaggcacaaaaaaacaccgacacaattatcggtgttacgcttaaataacatcatgcacaaataaacaaggacattatgtcattggattatcgtttatttgacatagagaaaaagcaccgataactgtttttgtatggtgatttggcttaaaaaaggacagactgctccctttgtccgccaaaatgtttccaatttttgcatttttaccatacaaaattccataaatcgttatcatcgctttcacctctttcttgtcaatattagcaataatcaccatatcataaggtttcccttatgtaaagctaaacaaatgcttacgcccccgctaatgacagtattatataacttgcttattaagcctaatccaagtacagaaagcgcgctgatcacatttttcacttatccgcgacggaacatttcttatataatgggtgaccggcagctgcctgcttgaatcccaatcttcctatagtgattttttatattcatgacagtatgatgatttgtcacttcagcaatcagatcgtttattcgatccagattaatcggtttattttctgataagctgctgaagctttctctgatttcttcaggatagacatttccggccatgcttgacaggccgttacacccgttactcagcatcttcggaaattcaacatctcctgccgcaaacaaaataaagtgatcagggaactctgtttgtttatgacgcagaacgtctcctccttctttcagcccccttatcccgggatgccggcttattaagtctttaagcgctttctcactcagattaaaaccggtccggccggggttattataaagcacagcctctttagaggtatgactgagaagttcgtcaacgtaataaacggcttgctgctgtgtcggtcttatataaggaggaaaaccaatcagtacagaatcaatattggttttctcgatgtgtttcatcagtttgacagcatcactggttcttacggctgaaacaccgaacatcagttcaacatcttcaaattttcgctgattaacatactcaatgatctgaagacgctcatctatgctgagtgaatgctgttcaccagtcgtaccgcatatgagtaacgaatggataccgctgtttttcaaatgttcgacaatagcatcaaatccttctaaatataaactttcatcttcatgaaaaggcgtagggatagcaacattaaaatttcgcatgagaatgtcctccaagtacatattcttgaatatctgcagagtatcatataacactgtctgacatttaaaaaggtacagtttcagataactcaacatgtcagatgtaaaggccgacacacaaaaaaagcaggcaaagagagcctgcttcattgcttcggccataattgttttatccaattggttttggaaggctaaaatattcagactcatcaacatttgatggataatttaggcacatgcccttatcaaaaacaatctgggtgcatatcctgctcctaaaagtcattcataaagggagtttagatatgtattattattatccgtattatgtatatgattacagacagcagcctgatttaagccaggcaaatcataaaatgcgaagccatttatctgcgattcaacaaattccaatacactcatcctcctttcaacaatcaatggctgcggtagtgaaacacttgcaggctgtcagcagagcactcgctctgggatgcggtatgagttcagaattcagatttcttccagacacttggggattacgagaacttcatactgtacacgcgaaatatcttactccgttgagctatcacgtttattccgctttaggcgcagcagagcttctcgccgccggacaaggccgggctcctcattttcctcttatggttggctgcatgaattcaatacttcgtctatggtcaaacttccccgcagcgatagcagacctgagaagagcagccggtcaccaatacgcgtcatctgtagacgaggcggaaaatctcctaagaccaatggttccagccacacaacaggcattatccatcagtcaatctgcagtgagtccggctatttggcaggcttccttacgtgccgcgcagttagctcgggaagtacgtcagaatgttgcacaatcaatgagtcagggatcttcttattaattaagccaaaagattttttcggctttacacagtcacataaccggacttattcaacacaaaaaaagagcagtaaacacgtaagttactgctctcctctgtctatccgccgttcatttgttttacaatgtattcagcatcatttcctacaccttgaagcagcgctgaacctcgcctatgctgccaaggcaaaccaataaaatacaatccttccacagctgatacaccccggtgatgtataattcggccttccttatccaaaacaccttctattttcatccaacaaagcggattcttaaaaccagttgcccaaatgatattgtttacttctaatgaagatgaatctttaaaaatcatttcattttgctttccggctatgactctttgttttaagatgatcttcttctgtcttattgcatgttttaattcatacccaaatatggggtcgcctttcttctgaatgaacttgcctaatattgatgtatgacttgcatgtaaaactcctaatttatcaaaccaccaaaagatgcttctttttccaatccataaagggaaataaaccggtttattactgcaagccaaatatgtaactctttctttggataattcaacagctatctgagccccgctattcccgccgccgactaccagtacattcccaggcgccagttgttttgaatgtttatattgtgaagaatgtaattgatgaatatgatcggctacatcccttgatattgatggaatattaggggtatgaaaaggacctgcggccatcacaagattcttcgtttgatattcttcccggtttgtttttattaagaaatagttctttaatttttggacacttattacttctgtccgtaattggatcgggatttcaaatctttcaacatattttttcagataagcagcaatttcattttttgaagggagtccatgcttgtctccttcaagctgcattccaggcaaagagctgtacattcgagaagtaaataaaaccaatgagtcataccggttgttccagctttctcccacttcatgacttttatccaaaatgataaacttttgtttcgacttctttagataatatcctactgagattcctgcctgaccggctccgattactatcgtgtcgtacatatgaatcccccctccggttttatcttaattgtcagcagacaaagtgagtccctatttccttctttaatgatgatgatggtcacgcggattctcagtttgggcctgacaaagaatcgtattgtcgtgattatgcgctgctgtttccatttgaatggttacatgtgtaatgcctttatctccaagttcatgttcaattttgcgtaaaatactttcactttcagaaatggtcagttgatcgttaacaactgcgtggcaggaaagagcattcaatccgcttgtgatagaccatatgtgcaaatcatgaatgctttgaattccttctgtctcttcaattgtatgaatgatgtcagtgacatcgatatttcccggagttccttccattaatacgtgaatggagtctttcgtcacatggtaaccgcttctcagaacaagaatagccacaatgacactggccactggatctgcccagctccacccgaaaaagatgataaggatcgcagccagtatggcacctacagatccgagcatgtcacttatcacatgtaagtaagcccctcttatgttcaggttattctttgtatctccgccgttcagcataatccaagcgaccaatatatttacagctaacccgatgatactaatcgtcagcatgccggttgttgctacctccggcggatgagagaaacgtttgattgcttcataaatgatgtaaagggaaatcaatattaatgcaacaccgtttatcacagctgcgagaatctcaaatcgtttgtagccgaatgtcttatgatgacttgcctttttttcggccaatttaaaagcaatcagagcaaccattaatgagatcgagtcactcagcatatggcctgcatctgacaaaagcgctaaactattggttaaaaatccgcctatcgcttctattatcatataacctgtaatcatgataaaagagatcaataaaaccttcttattggatccgccagcgtgattgtgattgtgacccataaaaatctcctccttatctcatacactgcatttattatttcttttctgttatgaagcattctaacatggacaaaaaaataaccttatatgattatgtgctcatatatgaatatataggttctttactgaaatgtcaaaatcttttcaatgaaaatgtccaatactttatattgctcttgatcaatgattgctatgaagccgcggattacagtaattactttaggcgcagacaatttagaaaaatcgcttcacttctatcgagatggcttgggtctgcctacagagggaatagtcggtacagaatttgaacatggcgcagttgccttttttgacttacaaacaggactgaaacttgccatttggaaccgcaaagacatcgcacatgaaacaaacgttacgttaactgcgccaagccctgcagaatttacatgaggacataatgttggcagtaaagctgaagccgataaagtcatggaacaggcaaaacaggcaggagcaacgataactgatcccgctcatgatactttttggggcggatactccggtcacttccaagaccccgatggacacttatgggaaatcgtttggaatccgcactgggatataagtgaataaccacatttcagaaatgaaaacatcaataaaaacacacctaaatgttctggtgtgctccaataatgatgtttagaatgcaaacgcagcattttatttgtttcccaaaacgatcaaactatttatacgatggcgggatgctttgcggaaaacggaatacattttcgggatcgtatttcgcctttattctttgaagccttgcaaagtttgagccataatatgcttttccgaagttctcgatattttgatccggaacattcacatatgaacctgttacatatggtttcatcagctgacgcactctttcaactgatgcaagatttgaagcttcttgtgatttatttttccaactggccgtccattccgtataaaacaacggacggcgccaatagaaggctgtttcactgcttggtactctgcttatcgcgccgccccaattgataaaaaagaaattggtttctgtcccagtcgctttttctaaaaattgtctcattactgcaataggttcttccggccaaagattgagcgcccacgccgaggagaatttaacactctgatcagatctgccgggaatcggttcgtcaggatctaagaaatctatacaatccgggtagtatagtgttttgattactgtttgtgccggcgttccggcatttaataaaggttttaataattgaaccagctctggttttgaaccgaggaacaatccttccacatggcacaagccatttactttgctgtaaatctcaaggtagcatcctaatcgttcgtctgtaaacggcgcccatttttgccacgctttaaataccgtttctaactgttcccacggccaaatgatattaaagacggttgcggttttaggggcacggtgaactttgaatgtatattgggtgttatatccgaaattgcctcccccgccgcctctggaagcccacagtaaatcttcattgcgggattgatttgcttgaataatcctgcctttggcatctaccattttcagtgcgagaaggttatcgcttatcaggccgatcgatcgggaaagcactccaaatccgcctcccattgtgattcctccgattccgacggttggactgtctccgaacggggccataaaaccttcccgagctaaaccttttacaagcgggccgacgtgaatgccggtttgaacggttgctaccgcgtttttttcatctaagaaaactttattcatgtcactcacatcaataacaatcccatcacttaccgtggaaagatttttatccagagcatggcggccgcttctgacacgcataggtacattcttctcacgagcccatttaatagcattacttacatcgtatgaattttgtgcaaaaacaaagacaagcggacagacatcaacataagggttccaattcttaaccgcctgtgtatagccggggtcccctttgaagatgacgcgtcctgttaactgtgctgatcccatctatttcactcccaataagcatttgattctgataccagtatatgtaggaattggacaaattcttagacagatgttctgcaaacttaaaaatagatacatatacgcgaagatgatataaaaacaaaaaaagacaagagcggcaagctgctgaaactcttgtctctcctgcctttttgtcatgataggcacttacatttattggcgtgatatcccgaccaaactatggaagtccatagaaaattatgtttaccctgccatgcgtggttctgctgagacaccggctgagcaatctttctgcttgatcccccgacaagaatcttattctttatcgtttttgcatccctgtacggataaaatcaatacacattgaatcttatcttttacatgatgaaaagctcttattttttcttcttgtgcttacgtttgcaatcctgttttttctctttcttatgacgttttttacatttcgcttttgctgctaattttgccgcttttacctttgcttctgccgttgctctggctgcttctgctgctctggctcttgcttcttccgctcttgctattgcttcttccgctctggctctcgcttctgcttctcttgctgcttccgctcttgcttcgtcgtccgccatatcaaaatcatggccaaggtcacaggcttcgttgtatggctttttcttctgaacgtactgttgatcttcaccttcgttataatacattacgccactccttctctcatcttttaatctttacatactatgtaaagaaataactgaagcttggactggtattttgatgaaccggcacattttaggataattttcatttatcgatacaacagattctggatgcttgatgaaacttaaatgtttatgataagcagcgtaaaaagggagactacgaaaaaggatgctgcacgctgcagcatccttctgtacaactttttattgaacgattggaaagtgttttttggcttttagtttgcttgctgtgtttgttttactggttctttgctaaaaagtccgacaatgttccacaagataattgcagcagctatgattacacgagtcgtactgacttctttgttagtaaacaatttatagccatatactgatcccaatgctgttatgcaaaaaatattgaaccatttactccaacgcaattagaaaactccttataaaatgattacatttccaaacaatgtattataatatcaacaaaatttttcaataatttaccttaaatcattcttaattggttttcctgatcattttctctaatcgtcttcgatctttcggagttttgatcgtttttttgttacaggctagacccagacatcattttcagctgtttgatcagttatttcctgcccggtattcacaacacctttaggctctacaagcaaaatgttacactctgattctgcataaggtttatgttcaacatttttcggaatgacaaacatttcaccttcatttaattttacttctccatcacgaaattcaatgattaaattaccctcaatgacaatgaagacttcatctgtttcgtcatgcttatgccaaacaaaatccccttgtaccttaacaagtttaaattgatagtcatttatttcagcgattacttttggagaccattgatcttggaacgcagctaatttctcttgaaaattaatcggtttatattccattctttccgctttccttgtaaaactctatcatttaactagtcccaaattaaaggcctgtccacttcagcagttctgagatagtctaaaagctgaccggtatgtacggactcatggtaagcgattcttaataacatgtctcctagttcgcgaatatatccaacatcagacctgtcaatctttatatttgttaaatctgtttcgtttaacgatttgatgaatgtcaaaaactcggcccgatacggttttgcaaattctaattcttcgtttactgtggtaaacgtttttgattcataaggattaatagtttcctctgaaaactcactcatatttttcattaaaatttgatgataaagaaattctgcttctaatatgtgtcttatcatttctttacacgacatggcttcggaatccgggcgccagtccattttttcctcaggtatagctgtccataacttgatgcttcgccgtcttacctcttcaaaatgtaaaataataaggtcaattgtattcaagtgttttcccccttttatttttataacctattctccttctttccaggaataccttcatgagctgcctcaaaaaattaaagatatattcctttcgcctctaaataaatagtcccatccacatcattgacagacgcggtgttaaaaatggtgagaaacaactcgctagattgataaatcgaacaattttaagataaagagatattcattcatccatacaatagacgctggataaacatatactgaatgatagttttcatcagaaaggagaaatcagctttggcaaaatatcggatcatgacttttgacgggggcggtaccttaggtgctttaagtttacagctattgaacagactagctgaagaaaatccagcattaataagccgaacccatgtatttgcgggaaattcaattggttcatttactgcccttgcattagcaagcggaagatctccgagggaaacacttcagtattttaaggatgaaatcctgcccgcattcagcacgtcccggccgggcggacctgttttcaatcaacaattaccatattccggttttattaaagcggtacgaaactttttcccgccaggccttcgccttaaagatctaagaaaacgaattgttgtcccttcattcaaattatactccccggtactggatcgttggacgcccgtattatttcacaactttcccggctctccctatataaatgagaaagtgagtgatgtcatactgcggagcagcggtgctcccgcgacgcagcgcgcctatcaaaactacgtggacggatatgtagtggcaacgaaccccagtacggccagtatcgcgtttgcggttggtaaagccaacgtgccattggatcaaattgcggcgctatccatcggtacaggtgaagccccgactcggttaagaagagatacgaggggatggggaatggtaagtgcggataacatacgtcccgaaaatctgaagaaccttcctccaaattggggagtccttttggacaggtcgcctaatgaacctttactgccatttcttcagatgatctccggcggaaatggctactatgaatccatggtcagcgcgaatctgctgggagatcgctttttccggttagatccgcggattccgaacttctccaaaacagacccttccgtggttcccgctgtcattgaaattgcgaacaaaaccaacttacagcctgcgaatacatttatagagagaaactggaacgacagccactaaggaaattcacatcttaaaataatgaacaaaaaataccaagggactcaaatcccttggtatttttaatgcggctgagagggtttggaccttcacggggtatttatacgctgggcattcgataaagtgaaatcttattaccgcccggcatttcaaacactgaagttaagcattacaaccaacaatcgggccatttaattgaataggactactcagaagccgcttcccattacgtaagaaaagcgactttttagatttgattttcaagttcctttgacaaattttgaaaagaccattgactattcagttggactgtattaagtttaactatatagtcagactgaatagaggatgaggatatgaaacataaattattaccgctgtctgaaaccatgcattatattttattagctttgcgggagccgcttcatggctatgccgccatgcagaagatcgaaaagatgagtaacggaactgttattttagcagccggcacattatacggcgcgattgaaaacttgaataagcatggctggattgaacctgttggagagtcgggccggagaaaagtttatatgataactgcggaaggaagcgccattttgaaaatggaacaaaacaggttactgcatattttatccctgtacgaaggaagtgaatcgaatgaagacatttaagatgttttttgatattgaaaaagaggagcaatggctgaacgagcaattacaaaaaggctatcgctgtacaaatatcagcggattaggaatatacactttcgaaaaaaccgacaaaaaatatgtgatgcgactggattatcatgattatttatcaaagaaaaaattcaagaactacagagagatctatgaagacttcggctggagttatataaacagcccatggctcagcggaactcgatattggcaaaaagaagatgatgatcaaaatgaaatcttctcggatcgccaatcaaagagtagttattataaaagattaatgagttattcatcttgttttggtttactttgcttattttattcttatttgatttacaaggattcaggtttgtatttaactgaaggtctgtggagtatggaaagcgcaatgttttggaaagcatttttatttgaaactccatttgcccttttgaggtcgcttcccgctcttatggtcgttctctttggctgcagtttctataaagcgtatcgaaaatattcaatgttaaaagaacaataacgcggggaagttacattcaaagaagtaattgaggatcatgtatctgccgaagccgggcgctttaacggaaaaaaagcgccctgcatttgctgataaatcagacggcttattttgttaatgatacatacttatttacaatggcttgagcgagacaagctgatgaatcaacaaaggtaagttcgctgcttttttgatccgtgaccatatttaaatccgtacatgcaatgataaccgtatcaaccttttctgctaagtcatggtgtaattcatcatataatgtaccagcctcatcgatttgaccttgtttaatcttttctattatgtgatcgacatagatttgccaactatcttgatgtaaaaaatcataaccttctctgtttaacgcttcttgaaatattccagattgaaccgtagggacggtggctaaaagagctgctttttttgagcctttaggtatttttttatggtttcatcaaccatgtttagtaaagggactgaaatcgatttttttatttgattaaaatagatatgtgcggtattacatgggatggcaataaaatcaacacccgttttttcaagctttacagccccctcaataattgccttttccatgtccgtatgattgagaggtttattcatgtagaaaggtgtcggacaggaataaatcatcatatgaggaaaatccatgtcatgtattgctccatatattttttggcactcgtctactaccttatctacaaatggcccagtagattttggccccattcctgccagtattccaatcataattgtcctcctctgtaaaaatgtgtacgaatacgatcacgatgagttattcttgtgtttcgcatctgaatctgctctcatttctttttggctgtcttctcctattttatcatttcattaatcgaattatcatatctaattccgccgcacgaagaagaatggcagatacattaaggttatgaaagcttgttttcattacactctctatcttccactttcatcatttctatatgttttcatgaattatggttaaaaatcggtgattaaattgtgcccatatagattagtaaagtgtcattgatgtcaagtcatgaactcctaaaggagatttaataactcattttcaacgaaaaactgatctctgttaattagtcgagattccaagatatacacggaccaattgaattgatctttccttttttgggaatcccacaggttccctcttgttttgatgttgtttttttaaaaaaagttattgacaccaataaatgaccatgttatcattaaaaatttgatatctcactccatatatgataaccttaagttaagttcccatatatggaggtggattatatgtttcaaattggcgataacattgtttatccaatgcacggagcaggtacaattgaagccatagaagaaaaacaattcttagaggaaaaacaacagtattatgtcataagaatgtcaatcagtaatatgacagttatgattccaacgcgtaaaatattgagttcaaatatacggccagttactgatatacgtgcattaaaacacattatacacatttttcagcatggagaatcagataagttactgccgtggaagcaaaggtatatagtaaacacgaacaaaataaaaacgggtgaaatacaagaaggcgctgaagttgtacgtgatttaatgcgaatgaagaaagaaaaagcacttaattcaagcgaaaaaaaaatgttggataatgcatatgaatttttgattagtgaactggaagtcattaaaggaatcactgaaaaacaaataaaaagtttctgctaaggttaattttaaataatgttttgcattccaaaaagcacccgcaagttttcggaatattacgattaaaatatttcaaagacgcttaacttcttcaacttacttttagaacattaacctcttttattattcctacaatctaatctgtttttattattaaaaatttcttcaacgaacatttgatgttttatcaaaaaactcgatgaaatagtcacttgatttttgtaatcctgattcacactggcacggacaaggagccgtaaggatggaagagaggcagggctttcattgttttaggtctaagtgattatttccagaagaaaaaacaaccactcccctctttatctttaagaatttcttacatctgcttccacagtgaatagcagttggttatcttcttttcataaaagagatatgcgaattgtaacaaagaataacatacagttatcttgagaacataaaaacaaatcatttatatatattccacatatcgtcaatccggtatgttatactgtaaacaatcctttgaggttttaaacctttttcttaccttgtagcaactgtccctactcgaacgttgagtagggtttttttattcactatgatacagagaacataaaaaaacaggccctatataaagagcctgtttgtataaacgattgaagattaagcagttttttgaacgttagcagcttgagctccgcgagcaccttgctcaacgtcaaacgttactttttgaccttcgtctaaagatttgaatccgtcactttggattgcagaaaagtgtacgaatacatcgtctccattttcacgttcgataaatccaaaacctttttctgcattaaaccatttaactgtaccttgttccatttttgttgcctcctagtgtgttacacattgtattactatccttgcccaaagtatcatcaagacgaaaagtcgatattcatactatcctttacacgaacaaaaataattctcctttatcatatcacgaaacggaaataactgcaaattaataatgtgttcattcatgttttatttgttaaacctgtcgataccagtgcaaaataagatgcctattaatagctatggtttgaaaacaccgtgaaaatgaatcacgagtgccttcaaacccagtacttcatattgattgttaaagatttctttaaaaagctcagctgtttcttgttcaagtacaagatattcttggctgttcactggtacagctttgtttctgcagatgtttccaaacgatcactcaggtatacccctattttaacggtattaacttgtcatgtttgttcctcaaacaatcaaaatttacggtctaaataaaccgattcacattggggagcatggagagagtttggcccgataaagagccgggtataatcttcatacgctttttgtatcccggctggccattgctaataaagatttaatcgagatggaaacaagtatctcatttccaataatttcacagacgaatgggaaagatacttatcatctatggtgtatgacgctgtgacttcaaagacaaacgttttcgatacttagaagaacatcagggaaggggaaatctttaaaaaatgaatgaacaaaacctaaggactttgagaaaactggttacaccctatgaaaagtccgatttacaaaaaagtatatgtcaaatcattaacacattggtgccatttttcctgctatggtatttggcatataagagcttgtccatttcttatttccttacattagccatttctgtcgttgcagcaggttttttagtaagaaccttcatcatctttcatgattgctgccactattccttttttaagaaccgaaaggcgaatcgaatccttggaacaattactggaattctgactctgcatccgtttgatcattgggcacacgatcattctgtccatcatgcgacaagcagcaacctggacaaacgcggtacgggcgatatttgggtactgactgttgaggaatataaggaagcctcaactaagacaaaaataatgtaccgtttgtacagaaatccgtttgttatgtttattatcggaccgatttacgtcttcgggattaccaatcgttttaatcgtaaaggggcaaaacgcaaagaacggatgaatacatatgtaacgaacctggggatcgtcgctttggcagcacttttatgttgggctatcggctggcaaaactttctgctggtccagacaccaatttttatgatatcgggatccctcggaatttggatgttttatattcagcatacgtttgaggattcatatttcgaagaagatgagcattgggaatatgtaaaagcagccgttgaaggaagctctttttataagcttccaaaagtcatgcaatggttaacaggcaatatcggtttccatcatgttcatcatttaagcccaagagtcccaaactataagcttgaaatcgtgcataacaacactgaaccattgcaaaacgttccgaccatcacactggcaacaagtattaagtcgttaaagttccgcctatgggatgaagaaggcaaaaaatttgttggttttacccactttaaaaaaacttctaaaagccaggtatcagctcggctaagaacggattaaataaacgcccataatcgatgataatgtgcagtgtatcttgcataataaaagtgcagactcgcgcaaagattttgtgcagaggtcagcacttttttaatgccacatgcacttacaacaaaaaaataccaaaggtgtcaaaacccttggtatcattagggtgcggccgagaggacttgaacccacgggttattcacccgctgggccctcaataaagtgattctttattatgaattacaaaagcctataatatcagcatttgtttattttgattatgaatgtttacttcgatttatttttatttgggagtaaaaatggagtaggttttcatttcaagacagttaatgtcttgttactggtgacatgtctattagagtaaccgcctaattgaaatggctagttctccatgttttataatgaactctggcttgatgaagtttttctatgatttgttctagctttttatctttccatttcttaatcagcagaactcgcggtttgtaacaccttaatattgcctttcaaaatcctttgcataaacgatcttaactttttgactgttttctttgtattccccttaaaattgaataatcactttcccttttggccgtccatttgcgactagttctagcgcttcatttacgttgtctatggtaaattgtattggatgaattgctggagcaatgttgttttcttcaatgattttggtaatctctttaagttgtgcgccgtcagaacgaacgaagataaaatggtattccacgttttgtttcttggctttgcgatcatactttgcgccaacaagggaaaatagcatttgtttccacaatggaaaattccggtcttttccgaagcgtttatttggtcctgtacggagagagagcaatcttccgcccggtttgacgatactcaattcactgtcaaattctttaggtcccagtgtatcaatcacataatccacatttgacaacaagtcaacatagttttctgttgaataatccaaatattgatctgcacccatttccaaaatgcgttcgcgcgcttctgagctgccgctaacaatgacatttaggcccattgcctttgcggttggtacagccatctgaccaaagctgcctgatccacctggaatgaagacagatttacctgactgtgcctcaagttcttcatgcagaccttgatacgctgtgagtccagccagtggtgcagcagcggcttccacgtaagacaaattttttggcatgggtgcaattgcggcagcatcaattgcggcatattccgcaaaagcgccaattttttcgagggggagacgtgtatagatggcatctcctacgtgaaattctgccacattttttccgactttttcgataactcctgtcaattcattaccaagcgttaatgggaattcataatcttgaatcagtttcacgctgcctgtaataattaacatttcgagtggattgactgccgcagctttgacctttaccaagacttcattgtcatcgatttctggaattggaatgtcattgatttgggcatagagatcttttgaatacttggtgatctgagctgctttcataagttttttcatttttttatcagcatcctctatcatattacgtttattaggtttttacctttttatataatcgtttaggtggaggggaatctttcttttaacgaagtctgacttccaattttatgattaaccctccacctaaacagtagtcatttttagaacgatcattctcaaataattaaattttatagaccgatactgtgaataaatgtttctcatcttcctagtgttattgatgtagagcatcgttatataggtttaataacttgaaatattacatctctagaatcggatagatttgatctcttaattgaaattcatagtttccgtctacaactcctactacttgattactatcataaagctccatcataaaactcgccacttgctcaactgtgtggtacatcgggatatttgctttgtaatcatattctttcgtatcagatgcagttttcatgaattctgtttccgtgattgctggcgctaaaactttcaccttcattttcgcacctttgcgttccagttcttttgcaagcccttctgtaaatgcactgacaaagtatttagatgcagaataagtaatactgccaacagcaattgcatatccgagtgctgatgatacgttaattaactgagttccctctacatccgaataatcacgtacaaatagtgtagaaagaatcgttaaggattctacgtttacacgtagcatggtttccactttatctaaattctgatccgtgacagaagaagattcaccaagcccggcattattaatccaagtctcaatttgatattcctttaaattgtcatacagtgtgtatgcctgagctgtgacagataagtcacttgtacgaataataacatccaaatcaggattaatattctgaatggttgatttaagctcttctaatttatctaatcttctagctacaataattaagtttttgccgcgagcagcaaattccaatgctgtctcatatcctatacctgagcttgctcctgtaataactgtgtacttcatattattctctcctcgaaaacaaattttctaattagttaatccatataacaaaatagattcagtctagtgtcgacaaagtcaaatcaataatgttttctaatttttccttatcatttgtcgtttttgctaatactcgtatccctacgagtgaattatgaataaattgagaaagccctttaatgtcatggtgtttagaaatttctccttgttcttgaccatgttttagcagatcaaataataatgcttccgcatttataaaaatctctgtgattttcttagctacttcttcatctattagggataattcaacagctgcattaacagctaaacatccttttggctgatcttcttttgggtaaataaccatttcaaataattttcgtatagccagcttaaccgttaattctgttttcacttcattcttcattcttacttccattacttctacatagtgacttaaggctcgcataaataaagtatgtttgtcgccaaatgtatcatagatacttctgcggtgaacgcccatatggtccaccaagtcttgcatggatgttttttcatacccctgttcccagaaaaggtccattgcttttcttaatgcttttttttcatcaaattctttatttctagccatgttatccctccttcattcttaaataattaaagaacgatcattctcatttgagcagcaaaacagttagatctgacgtatttcaagtatatcaaatttaagaacgatcagtaaagaatttagaattaaatcatgtgttttatatgctatgcatggctactacctgaattttaacgaatatcgctcctttttatttttcatcaaatcatttctttaatgtcattgacggcaggtcataaagcatactggtgtgttttcgaaaatacccctcatttcagtaaagttccccgctggaatattcacactttggacacgaaataggaactgtagaagagtttcccggattttcaaactaaagtgtattaaacaatacggaggattacactgggtaacacagtcaaataaaaaaaactctaactaatccacaaaggttgctagttagagcttttttgtgtttttagatctgaatcactaagcacctactctgtcatcagcaacgtgaaaaggagctttgataacagggacattatttgttaaaaccactcctgcgatgctgcccaataaaatgactgtaaacaaagtcaggctgatcttcattaataatctccccttttttttattttttcgtctagcttcaatctcagtcgataatactcattggaacgtgataaatcccctttttcataaaaataatcagctgctctgattgcaaaattttcaatgtctccgtccattcttagaaggaagataccattagcgatgacactaatggtaccctttgtttctactcaattattcagcttctccaacaacagtaaagcgttcatttatatgttttggattttcaatttcatccaatactgcaattgcatagtctgcatagctgatataactttcgcctttcgaattcacaagaagatgatcttttcctgactgataaaatccagttcttttcccgtctgggtcaaataccgctgaaggactgataaatgtccagttaatatcagaagtttcctttagttcttgcaagttacgaccttgccctttagctgtcggaataaaaatctccgggaaatcaggtgtatccattacactgacagttttattttcgtctacataaagactccctgctccacctacaattacggctcttgtatccgttccttttaatgccctaattaatgcccggccagcatctacatgtgcctgttcttctcctaatggagcaccgaaggcattaactgctacatctaacttttttagatcatccgatgtaagatcaattatatttttttcaatgattgcaatcttttcctctttaagttttgcagcatctcttacaattgcagttacttcatgtcccctgcttaccgcttctttcaagataagacttccagcttttccggttgcaccaatgattccaattttcaatttaaagtcctcctaatcattcaaaattttaaatgtaaccatatcgattacatgtaataagtttagttacaccttatttatttgtcaatacttttatcatcttgttaattgagcatattagagtaaaagaacttgtaatacattcagttacaagtgtactataaagagtgtaaagtaatgagggtggtgaagaaatcatgtctattagcagccgttttgctgtaggaattcatatattggctcttattgaaataaatgaagacggaattagcacttctgaatttttagctggaagtgtaaatacaaatcccgccttaataagaaaaattatggggatgctgaaaaaagcaggtttagtaaatgttcggccaggtattgcaggagctgaattagcgaaggatttaactgaaatcaccttacttgatgtttatagagcagttaatgttgttcaagataaagaattgtttagtatacatgaaaatcccaatcctcaatgtcccgtaggccggaacattcaaagtacaattggtccaatatttgaaatcgcccaatctgccttggaaaaagctcttgggcatataacaattgaggatgtggtaaaggatattattgaaaaagaaaaattgaccaataattgttaaatgatttcacagaaaatcttttatcagactggggataagaaaaatggctttttgatgaaaaagagcagacataaaatctactccttttgatgaaagatttagattacggtaagggatataaatatgctcatgataaaaaggaaaaattaacgacaatgcagacgatgccagattctttaataggacgtgagtattactatccaacaactcaaggttcagaagctaagttcaaacaaagacttgaggaaatctcggattggtataaaagaaaccgcaaatcttagtttgaacgaatatgttctgtatataaaaataatgaggtatggagtgaattgataatgaattatggtgaaataaaagattactgcctaacctttccaaactcttatgaagaccatccttttggagatggttggactgcaattcggcacaaagggaataagaaaatatttgcacttatcttcactcgcgacgaacacttatgtgtcaaccttaaatgcgaacctgaaagggctgattttctacgtggtctttttgaagaaatcaagcccggataccatatgaacaaggagcattggaatactcttaccttagatgagggactcccagagcatcaaatccatgacatggtaaagtacagctttgaactgacaaaaccaaaaagtaaaaaggaaatataacatcgaaggatagaacgctcattataattattcacccggcgcaatgatacagaggaatatgcaaaaaaacctcaaggcagcaatttttaaattcgtatttacgagatgattttttcgttattgtgagtcctttgtttctcgacataggttgaacaaataaaaaaagagcagactcaaagtccactcaattaatttagatgattgcttatttcatccagacacctataaaaattgaaaggtgacgatgatatgccgcaaaggtcatttagcgtttaattaatactgataactcaccttcaaacactttttcctctttctgattataggtagataacaatacagtaagtatccccgtctggcttttatttggttttttatcaataaccttaacaatagtgttcagtttagcattagggtaaacaggtgctaggaattttatattattcattcctgtcccagcaataatatcgtcttcatgacacccttcttcaatccaaagcttaaaagtaatagataacgtttgtattccagaagcaataattccattaaacctgcccatttttgctttttcttcatttaaatgcatgtattgtgggtcatacacttctgcaaaattcattatattctcttttgttaattcaaaagatttagtttgaaaaacctgcccgatggtaaattcatccaatttcataaataaatctcctagaatctaaactttattattaaatctacgtagcattttaacatactggctctcacacaacaacttaatggtaaaacaatcgttcccctatcaggaatgaacaagcacattgtttttgtttccttgcctttaacctctttataatcaggtgttttcttataaagaccaaggcggtcgccatcaccatcacccggcatatgtgccatttcctatttcctcataagaatctccaagcttctcataataagaataagcagtaagcttgcgagaactttcttctggctgataaaacgcaagttgaatatatttcccgtcatcatatacacgaattatagcgttatctcttttgtactcatctgaatctgctcgcatttcttttctgactttcttctcctgcttcatcacttcattaatcattatcatatttactgccgccgcacgcagtcagcagaaggatgaagtgacggacaaatcatacgacctactataagtaagtggacagtaacagataaatttctataaaccaaaaataccaagagtgtcaaaacccttggtatcattgatgcggccgaaaggacttgaacctccacggattattccacccgctgggcccaccatctatattcataaaactattgctcagatgtcagcatgttaagtaaattacgaatttccttgttataacgtttaatttcttcttcattacaaccggttttatcaaatactgcattaggtatcattgtgactttttctttaaactcattcccttcagttgttaacgtaataattacacttcgttcatcctcttttgaacgctctcttataataagacctcgctcctcaagtcgttttaaaactggagttaatgttccggagtctagatataattcttcgcctaaacctttaacagatattttttccttctcccataaaacaagaagaaccaaatactgtgattagcgtacaagttctcgttttctgctttggaccccatatagaaaataaaaagccagctctccttcgggagaagaactggcataacaaagcttcttgcttcttattttgctgtattgctcggaccttttaatttctcttcgttcttgcgtcaacgttttattattaggacacaaccaataaaataatgacgatcgagaatagcaacgctgcttttgcaaagcagtaagccctccagaatataaaagagctgcagtcattgctgctcggataatcccagcttattctgagtctgtatttcgagtagccggtcaattaaatggatgtttttttcattccttttctgtttgttccattttccaccacagtgaatcttttggattttcaacagcttcttgaaactcagctttagaagcaactgttgggtaagaaccttttaaagatttacctgaagtatctttaaataaggttaacacaactattaagccaattaaactaactgctaataaatagaaacccggcgccaaattgtttcttgtcacatgggttaaccaagaagcaactaaaggtgttgttccaccaaaaatagaaactgataagttgaatgtccaggataacgtacgatatctaatgtcagtatggaacaacgtaggtaaagatcctggcatagtaccttcgtatacagataatacaatacctaacattaaaagtcctataaataagaatgttatattccccatattaagaaattgaaaagagataatcgaaaatacaattcctaatactaatccaattgttataacttttttatttcctaatttatctcccaatttaccaaaagttaaagcgaacggtaccataataatcaatacaattgctgtaaccggtgtacttatattatcacttataccaaggttctcatctaaataagaaggcatataacctaacaataggtaattggttatattgaaaaatgccacaaatacgatacataaaaagatatcttttttatatgttttaatgacttctaataaacctggttgttgttcttggctttcagagatgtcattttcaaaaattggtgattcatctaaatgacttctcaaatataaaccaaataatcctattggaatacttaagaagaaaggaattctccatccccaactattcatttgaacatcagataaagtccagaaaagtactgtaactaaaacagaagctactatataaccagataatgtgccgatttctaaaccgctgcctaaccttatacgcttattatctggagaagattctgcgatatataccattgcaccagcgtactctccacccacagaaaaaccttgcagaatacgagctaagagtaataatataggggcccatacaccaatctgttcataggtaggaagcacaccaattattaaagtagataaagccatcattaaaatagtaattgttaatactattttccgaccaaatttatcacccattttaccaaaaataattccgcctaccggtctaagtaagaaggcaattgcaaatgtagcaaaagtaaatattaactttaattcatcgttttgaactggactgaaaaagtttttactaataataactgccaaataagaatataaagcaaaatcaaaccattccatcgcgtttcctatccctgtagcaaacacgcttttcttcgctttttgaatgtctacaacgttaatttttttcttgttaaacttcatttaataatatcgactccttgattatcaaatccacattatacaagcgtataaacggtccaagcatgcagtcccagaatgtatagcgtaatgcttctctaaaagtctgggggtttctgtttcacctgatggagagctaacggcatagtggatgattggttcaactgtacctaaaagactagactaatatccatatcagcgccaaataacattgtaaaccaagaaagaaggatgaaattcagttttttctttcgctggtttccttaacttatttttgccgattggactaaaaataatacaaaaagcaacaaaaagagaaacatccaacaaataataccagccaaagcggttagtgatatatccttgggctgtggttggtattttctgcagactatttggagaaatgattccccttcatacagatctattgtgaatattatcacaatcaaaaaaaaacttttatttcttcaaagtatcctaaacctttattttagttcttccattacgtcttccaatatgtttattataagattgatgtcgttcctaagaattatttactgattctatctttattaccccacaatcaggtgaaacaaaacactataaacgtatcatatctttttaaaatctgacaagctcaacagggtgatagaaacccggctaaagcccagctagtcaatggatagaagaaatttttttgttcttcccaaggaataaccgtctgcgtttaatctagcccaattagaaagaaaaagagcaggagtaatcctgctctttcattcaaatctttaatttgtatgaagaattttgtataccttttcgactttctttacctattaatcagtatacagactacaacagaaataagtagcaccaggtatgaaataatggatgcatttaaacaggccaatcaccgacaattgaatttaggaaaaagcgttaaattctctcttatgatgttgttacgtattgttgacggtaaaattattgaacatagatctcatgtggatgtgcatgatattctccgtcagcttggcgttaattaacagtaaaaagttgaaatagtgagagaccaggtgaatagcttggtctctttttttataattaagtcctcgctctatgccctcctgcattcagtcgatgtaactttgaaaagtttaattaacatctatcacaaatccttattttcataacacatcatttatttcagcttccctcgcgaataccggatcaatgctcagctttaagatagttaaccaatttctccgcactgttcttaacatcttcttttgaaaggtgaagtgtcccatattgtgtaaaggcaggaagaaaacgcattcctatatagttagcagtgacttgaaacggtctgataagctcgctgatcgtgatattatattctccgcctgcttgataatcagattcctgtgcgcctaaggagatcgctaagagcagttcttttccatgcaatttagtacctccagttccataagcccagccatgtgttaacacatcatcttcccattgtttgagtaacgcgggactgctgtaccaatacattgggaactgaaaaacgatacgctcatgatctaacaggagctgctgctctttttctacatcaatgataaaattagggtattcaccgtacaggtcatgaaccgtaatgtcattctcttgctttaaacgattcatccaggttttgttgacaacagacgtttccaaattagggtgtataacgataactaatgttttcatttgactgttatcctttcttcgccgattagttattattgcttttgtgataaagaattgcttctaattttaaaataacaacttatttacacctattttatcctttttcatgaattcagggcaactattggacaccgattacatttatagccaaaaaaaggcttaacctattaaaaaagattaagccttttcagtacctttatgcccctaccctattatctcgtgtctaaattctaatagctgatcatataacaaggcatctttgttttcctccatgcttgtaatactttctctacttttgcaaattggagcttgaggcattagtaactacctataatgatgaaaatatttgtgcgatgtcgactgcagatgacttactttaggtaagtgggcagtttgtgggcagtagatcatttaaaaacaagcacaaaaaaataccaaggatctctctattacccttggtatcactgagatgcggccgagaggacttgaacctccacgggttattcacccactaggccctcaacatagtaaatccatatcactggttatgaaagcttgttttcataacatttcctattttcatttgccatcatttctatacgtttatatgaattatggttaaaaaatggtgaggcaaaacatcaaacgctctaactttttgatgtacattgattagaactttaatttctttcttcttatataaatgctgactgacgaaagtttctaagtcggcttctcaacctgtaaaatcatatctttattcaaaaaacctttatttatagcattgagttaatggtgtacatcgattttcatagatttattataactctggacacaaaaggtgcactatttttaggtgtaaattctactcactgaaaaattatgagttattcgccaccattatatagatataatggatttcccaaaaaaccaagaaaatttaaggttactataaagatgcttttcatatataattaattacaagtaaaaatttaacaccaatataaatccgaaattgataaggaggtattaatatggatgtgaaaccaagggcagtgattggcgatcaaattctatttaatgaatgcatttcaacatttcgacccaaagaaattgatataaaagaagagcaagaatatatcggatatttattattagattttcacctaaatgaaactttaaattttcgtcacttcagtattgagccttccatgaagattccagtttcttggaatcggtctgcattcgtttcacctgtaaagttaccaaagtggtttaaagggagataccatcccgatttatttccaatagcactagctgctgttttttcttttgtatctggtagaccagtgaaagcacctagagagcttaagcccagaacatctactaccgaacaaatagataaatccactctgaaagatatcgctattcattttccagtaaaaaccgctgggactggttcctctaatgttcgtatatctaacgcggagttaagtaacatatatgggcgtttaagggaaatgattgatattctgtttggcctctcatacaaacaatataccctcgctatgcaatcaataagactcgttcatctggcacatatgaacaagagagatgattttggtttagcatattatctattagtttcctcaatagagacagtatctagtttagctattaaaaaaaacaaagttatttctaatacacatcctaatgaagaaaaatggagagaaatcagtgaaaaaaatggaggtgattttgctgaactatttaatgaatttatggcaatgaaaaagaaagacaagttgatcggcaaacgttttattgaatttatactagaatattgccccccaaaagaatggaataatttaaaacatcccgatgaggactttgaagagttcttagaagaacgttttggggataaaagacgagaaatgacaaagctttggtttgaaaagtatcctgaagatttaactcatgatgaaatcaaaaaaatattgaaggatttatatacatatagatcgaattttactcatcgaggagaaaacccaccttatcggggcccggatggaattgaaaaattttttcaagaagagcaagtatataaaaagcaaaatctaggagagattgaaatagagttaccagagagtatactactccctaatttcaggttaatatcttttatagcaaatcaagcaattactaattatttaaaaacaaaattgcgaaataaaaaataacaatagagtagcttaaaagaagctactctttcaaaattaattaagttttctaaaaagttgttatgcaccgactcggtcagcggcaattttaaaatcattattcggaacactctctccatctgcaaagtaagcaaatgttaaaatgctactcaacaccattactcccaatagaattcggctgatcttcattaataatctcccctctttttattttacgtcttgcttcaatactcatacgataaaatctgtttgaaagctctaattccccttctccgtaaaaataatcgcctatttcagttgcaaaattctccatgtcagcaaacatttttctgtcagcaagataaaaaaatgcttcattaattaattcatattcaccatttgaaaaataaagtccttctaaaattttaaattttgcgatgtattctttatcattcttattctcagcttcgtttcgtcctttaatgaaataattataagctatctatatcaaaattatgttttttagcataaacgtgagccatagcaaataaagcttttgtcaaaaaactatgttcagatttttcaaaatatttatcaaccatcctaaatggatagcagcattattataatcctttaactcttcataacaaatcccaatcttcatataagacataccaatcagatgaggaattttagtgtactctgcaatttccaatgcattcaaaaattgttgcaacgctctttcaaattccaaagaatctatcaaattccctgctactataaactgacagcgcaatgtttgaacagcgtattcatcgaacttctgaaatatttttaaagcacgattagcataattcatcgaaaaataagtctgtttcatataacaataaacgtacgaaactttgaaaaaaactcagctttttctatttcatcttccacttcagaaagttttgtttcagcaatcctataagcacttattgccgttgttaattctttacgtctgaattcgtacatacctgtaaaaaagaaatagtaatactcaagcattcccgttaattgcccctgctcttccatttcttttattgtctcatatgcactatctaaatcatcaatcctttttgattccatataactcaacatgatctcgtgtcagaattcaagcaattgatagtataacaaagcatcttgattttcttccatattcactaattctttttctacttcttttcttatatgctcagcctgctcaactgatcatttttaataagagtataccaatcattcaatttttgagtgactaggtcgtacggaatttttctgttttcatccaagagaatccggtgcaagcaaattcctccaatgcaaaaaggtacgaatagtctattgaagaaattattcttttcgtctttattgcggttattgtaaggcttttgtgtcttgacacgtgatccataaataaaaaaaaacaaaacacgctagaaaatgttctaacgtgtaaagattacttcattgtttactaaaactgattcttttgaggaacgtgttcgaccgattacctcgggtcaatgcaaatacttgatggccgttttgtattaatttaggaagaagggaccgaccaattactccagtccccccggcaacaatgatcttcatgctataccttatttacctgctaatcttgaagcagcttcttcaacttctttatttgctttttgtaaaacatcctccggacttagtaaagctgttccttgcactcggataatttgataatcctcaataccgaggaaattgaacattgatttcaaatatttattagagtattcaacttcttcataccagtcatcatttgtataaattgatccgctggcttgtatgacaagcattcttcgtccatctttaagcagacctactgacccagtgtcagtatatttaaatgtttcgcgtgcgatcatgatattgtccatatagtcttttaattttgatggaatattgaaattatgcaaaggcaaaacgatgacatacgtttttgcacttttgaattgtttcaatacttctgtcatgcgttctgttactttttgttcatcgcttgtcagttcttcgccctttccagccttatcccatgcgcttaaaactgttttatcaaccataggcacttcatcactatacaagttaatctgctcaagctcttcactctctggaattaattctttgtaagtttccaaaaagtgtttcattacccgtaaactatatgacaacgtatcatccacttttggatgtgcattaatgataagtgttttgctcatttaaaactctccttttattttatattaaagattaatttaatcgacgatcaattcggtctttaatataaaccctgcagtttattttgtcaaacggaacaaatcatatactaaagaagggttttatgattgactatcaccaaaaatactcctaagatacaatgtgataacccttaaaatcaaaagcaggtgagtttatatgcagtacagtgttggggttgaatatgctttacattgtctggtttatttaatagatgttccctccaaggaaagtgtcgggattcgggaccttgcagagttccaaggactttcagaaacatttctttcaaaagttttcggtaaattatctaaagctggtattgtaaattctgtcaccggtgtaaagggaggatacaggttagcaaaatccccagaagatatttccttttgggatgtaatagaggctgttgaaggaccaaaacccatttttcaatgtaaaaatattgtaagcaatggtctgctttatcgagacaaatgcaactcctgtgaatccagcaattcttcttgtacaattaacttggtaatgcttgaagcagaagaacagatgcgtaattatcttcgtaataaaacgctcgcatggttaaataaagaattggacgtagtattgcctaaaaaaacaaggacagatactcgggaatacttcataaaaaaaagctctgactaaattaattagtcagagcttttttgtgctattacaagtcatattatgttttttcgttttccttctcggcgtttgaatttgtaaaaacaatgccgtacctattggtgcttctcttgcataagaaagcgcaaatgttatactcatattaaagactatattaatcgccgatttatacggtctcttataaaaaagaataacaatcttcttttttacagattaatttcaaaaaaggaaggagaaatgtaaaatgaaagcattaatgactctgtatcttaggctcgctttaggaattagctttttatcttctgtagccgatcgattcggactatgggggacacccggcaagcctaatgtcgtatggggaaacattgaaaattacacggattatgtcgctgccttaactccttttataccaaatgctcttgtaccgatagcaggatggatagcaactatgtttgaaaccatcttaggaatacttttgatcattggtttcaaaacaagaataactgctgtattgagtggtgctatgttgattattttcgctctaggtttaacagtaggaacaggttttaagacttctcttgactattctgtattctctgcatctgcaggtgcattcatattaatttattttaaaagaataccctatagtatagatgctttactcatgaaaaaaactgtagaggctgaatcattttcacttgagtcagacaaatagccctcaaacctctaaaagatagggaaagaaatatcgaagcataaaaaaggagcagacataaagtctactccttaattttcggtttccttccctttaacttcttcataatcaggtgttttcttatacagaccaagtcggtcgccatcacccggcatatgtgccatttcctcataagaatctccaagcttctcataataagaataagcagtcagcttacgagaactttcttcaaaaaaataccaagggcgtctacaacccttggtatcattgagatgcggccgagaggacttgaacctccacgggttactcacccgctgggccatcaacatagtgaaaacgtatcatgtattacataaaccttataaataaagcattctttatctacatttccacttgttttcttctttttttatgaattttgggcaaaaattaggcattactttttttaaaaaaatcactgaaaatattagctttaaatttgtaattccaactaagatctaagaaaccactaacaaaagaagtaaggtggtctcgcccaataggtgcgatagttttttcttttggtagtatcttgacttgtccgattttgagtaaaaaagagtacgtattaatcttgaatagcacaaaaaacactacccttttcgttactttagagaaaggatagtgttttttggttttgcgggtatcggaaaatctttgctagtagcagtacctcaataaaagatcgcaaattccacttacctagctatatcaaggcttacttgtctgatttgggatgtatggggtacaaaagttgagttacaaacattattatccaaaagaatgtttactgtaattattttacatggtattatttgtatcatgcatacgaaatatgtatgtataataaatgaaattaaaaggagtgcttgatcgtgaatcttaagttcattttcaaaggagtaacatcgactctgatagctggtgtaattgttggaacttgtactatacctgcttttgcggagtcgactacaagtgtatcgtcgaaaaattatgcagttacaagtggagtattcaaagctctagatagggaaatttcagagggttctgttgatcaatcaagctggagtcgggagttcgaattagatgagaatgacggagcacaagtaaacttctggatttcaaataacggaagtaatgacataaaaatatcaattgatggaaaagtctcaagaaccatcgcaccaggcaagcaaggcaacatttctgccgaggttaaaaatggttggtttggttggacatacaattacacatttacagcttcaccaacggctcaaggtggtagtgttaagatgaaatataaaattgctcaaagaaataattaacgaattacggaaaggtaatcacttattacctttccgtaatttcatcatttttttagttttttaatagattccttaaataaaaggttttgtattaaatcctatatgatgcaaatcaaccccattagtaattacttttctccaattttctgctcctgcttttcctgctcttttcccctcaaccttacgaatattatcatgtcctatatttaagggttatacagcgctcattatcattatttacaccttttttgatgtattttcatattttctggacagtaaatgggagtaaagagaccttgaccactcaccaagataagtaaaataaaaaacgaagggcatcaaactagatgacttactataagtaagtgggcagtaacagataaatttctataaacaaaaaataccaagagtgtctaaacccttggtatcattgatgcggccgagaggacttgaacctccacgggttattcacccactaggccctcaacctagcgcgtctgccattccgccacgaccgcgtgctatgaagctgtctttccactaagcatataagctagtgatgatgatcagcactttgaaaagaaagtgcgggtgaagggactcgaacccccacgtcgtaagacactagatcctaagtctagcgcgtctgccaattccgccacacccgcgtgacaagtggtgagccatgaaggactcgaaccttcgaccctctgattaaaagtcagatgctctaccaactgagctaatggctcgctctaaaagtgattcaaaaattttaaataaaatggctgggctagctggattcgaaccaacgcatgacggagtcaaagtccgttgccttaccgcttggctatagcccaacgaaggtaaatggtgacccgtacgggattcgaacccgtgttaccgccgtgaaagggcggtgtcttaaccgcttgaccaacgggccgtctggttgagaacttatctggcggagaaggagggatttgaaccctcgcgccgcttacgcgacctacacccttagcaggggcgcctcttcagccacttgagtacttctccatatggctccacaggcaggattcgaacctgcgaccgatcggttaacagccgatagctctaccactgagctactgtggaataatcagactttctttattataaatgatgcgacatattgtgtcaagaagcaacatttatttttttaagaaagtgtcgttgtctctcaacgacttttataatttaacatagaacattaaaatgagtcaagcctttttaaaaaattcttttgatttttcctctgcactttccgcaggcatatctttccggattcattgcccgcttctttatatactgttggccgcaggccgcgcatctatacatatatgttttcttttgtgtctttttggtttgcagcggcgtgcagaatctcggcgctccgactttctgaagcaggtctctgaaatctttgtctctgtgcttgtacccttttccttcaaggtgaagatggtaatgacacagctcgtgtttaatgattccttccagctcgctctgcccgtgttcgagaagatattttcggtttaattcgatgttatgggaagacagcatgtaccggccgcctgtcgttttcagccggtcattgaaaaaggcccggtgacggaacggctttccgaaatcttgtgcagagatgtcttccgtcagcttttgaagttgttcgttatccataagtgcaccccgctttaaaaacattgaacgggacaattcaccgttcgcatacaatgagttaaaaccgacctctaactaaaagctgaggaggaatgagccatgccgaattggctgatgaaacaaatgcaaaaagcgtttttagaaaaggacaattaccaaatcaaactgctgaatcagtgctggtatttctacagaaaaaaacactgctcgtaagcagtgcttttattttaccatagacagcgacactctgcctttttgcacgtccaccccttcgacccatacggtgacgatgtctccgaccgatacgacgtcgagaggatgtttgacgaattgattgctcagttttgaaatgtgcacaagcccgtcctgcttgacgccgatatcgacgaaagcgccgaagtctacaacgttgcggacggtgccctgcaattccattccttcctttaaatcctcaagctgcagaacgtcttttttcagcaaaggcttcggcacttcgtcacgaggatcgcgctccggccttgtcagctgcccgcaaatatccgcaagcgtaatttcccctataccgagctcttcagccgtttcagacagcggcagtgcgctgattttctcttttacgtccgcgcttccgatctgatccgcagtgagctgcagttttttgagcagcgcctttgtctctttatagctttccgggtgtatcccggtgcggtcgagcggttcctgtcctccgggcactctcaaaaagccgatgcattgttcatatgtttttgcgccgagacgcgggatttctttcagttctttgcgatttgtaaatttgcctagttcatctctttttttgacgatattgccggcaacggttttggataacccagctacatattgaagcagcgcggctgatgctgtattgacattcaccccgacttggttgacgacggtctctacgacaaaacggagagattcgtttaattgcttttggctgacatcgtgctggtattgcccgacgccgacggatttaggatcaatttttacaagctcggccagcgggtcctgcaacctccgcgcgatggagacggcgctgcgctcttcgacctgaaaatccggaaattcttcacgggcgatttctgacgcggaatacacgcttgctccggcctcattgacgatgacataataaatgtcacgctctgtttctttcagcacatcaacgacgaattgctctgtctcccgtgatgccgtgccgtttccgatcgccacaacctcgacttcgtaccgatccagcaattctttgatttttttccgggcttccgctgtcttttttacgggagcgtgcgggtaaatgacgtcgattttcagcacttttcccgtctcatcaacaactgccagtttgcaccccgtacggaaggccggatcgacgccgagcacaactttccccttcatcggcggctgcagcaggagcttacgcaggttttcagcgaaaatatgaatcgcctgcgcgtctgctttttctgacagctctttgcggatgtcgcgctcaatagccggctggatcagacgtttgtaactgtcctcaatggcctctttcagcgtttctttcacaggcgtttcacggtgtttgataatttgcttttctaaataagcttttatctgatcggcgggcggttcgatcgcaatctttaaaatgccttctttttcaccgcgattcatcgcaagcactctgtgaggaacgaccttttggatcggctcttcgtactcgtagtacatttcatagacgtttttctcgtcatctgcggctgacttgcctgccgcggaagtgagaattccttttttatacgtttcctggcgaatccactttctgaaatgaggatcatccgagatttgctcggctatgatgtgcttcgcgccttcaatggcttcctctcttgaagcgacttctttttctgcactgatatattgatcagcgatgtcgtgaaggcggttttctttcgggagagaaagaatatagtccgcaagcggttcaagacctttgcttttggcgacggtggcttttgttttccgtttttgtttgaagggacggtataaatcctcgacttcctgaagcttaaccgcttgttcgattttttgcttcagcccttccgtcagcttgtcctgctcagagatcaatctgatgacttcttctttccgctgcgtcaggttttgtatgtattgccaccgctcggagattgcctgaatctgcacctcgtccattgagccggtctgctcttttcggtaccgcgcaataaacgggacggtattgccgtcttccagcaggcggatgacactttcgacatgtttttgggataacgctgtttcttcagcaatttgttttttcaaaagggctaacgtttccatatcacaaaagcctccatctcttcattctttctctagtgtatcaaaaaacggcggaacataaaaaaagcagccttacgataaaagctgccctagaatataggtcaaatcatcacgtctggatgttgtgtacggatgaagtgattttgatatatcttctattgagtgtccctgctttaagcaggtgcggatatgcggaacctcaagcccatccgtgtagatgatgaacctcgcccctttttcgtatgatgacgtatacgttttgtatctttgcggtttgcctgagaggtaacccgaaatcggcagcggatgaaagacttcgcctgatggggagtgcaagaagaaacggacgttgccgatcgagcagtatgtcaattcccttttgatgaaattgatttttaagatggaggcagtcgcccctcttttgtttttcatcgcttgattgcagcgctcaatgatgctttccacatcctcatccgcatacgtttccacgatgtctttaatggctgacgaggattcgttggcaagagatccgctgccgagaccgtccgctaccgcgcaaactaattcttcttcattcgccttcataaaaaagctgtcgccgcatatggacttgccttctttatttaattggtatacaagagtttgaacatgttcattttcttcaacctgaatcattacattagctccatggagggatctccaatcaaggcctctctcagttttttcaccgctttccgctgcaggcgcgagacgtgcatttgagatattccgagaatgtcccctgtttctttttggcttttattttgcacaaatgttagatcgataatctgtttttcgcggtcggacagcacatgaagtacgcttttgatcatcatctgctggttgacgcgttcgtatccttcctcctgcgaaccgacgatatctaaaatcgtgacggtgcttccgtccgcatccgcttcgatgctgtgatcgacagacagcgcctgatagctttttcccatctccatcgtttcaagcacttcctcttctgacacatcgagaaaggctgcgatttcttcgactttcggcgaccgctgcgtctctgtcgtcagctgatccaccgccattttaatgcgcggcccgagttctttaatccgtctcgggacgtgtacgctccatgttttatctctgaggaagcgttttatctcgccgatgatggtcggaatcgcaaatgcttcaaaggatttgccgacctcgggatcataccgtttaatggctccgagaagtccgatcatcccgacctggcggaggtcttcatgaaagctttttccttttgaatatttctttgccagcatttcgacgagattggtatacacctcgacgagtgtttcctgggcttctttattatcatgtgtttgaaagtcgcgtatgagccgatcaacttcatctttagttagtttcgtagtttttgatggttgtgccatgatcaactcgctccccatttaaatactttgtcatcgccacggttacgccagagttgctttgaactttgacttcatccatgagcgtttccattaaatacagaccgagccctccttctgacaattgatcgactgtgtgtgaaggtgtgtacggcccgagatcctgctgcttctgatcaaaatcaaagctgtctccctgatcggcgacaatgacctccagccgatcctcaaacacaccgaaccgcacggatacttctcccttattttcatctttgtatgcatgctggacagcgtttgtacaagcttcgctgacagcgatttttaaatcttcaatgtcatcataggtatagcccattctgcttgcgacccctgataacgtaagcctgacgattcctacatattccggttcggccggaattttcatctctatataatcaactgatgtactcattgcacgccaccttctgactttgccgaaatgtcaatgatgtccttaagccccgtaatttcaaacagacggacgagccggtcggaaagattctcaagcttgagagagccgccttccttgctcaccgttttaaacacgcctacaaaaacgcctaaacccgtactgtccatatagtttacatcttttaagcagattctcatgtccttcccctcgtttgccaggggcatcagcttttcacgaaccaccggagctgagtatacatcgatttctccagcgatattgatttgtatatctgaaagattctccttcatatctaccgttaaattcatcgtatcacctctgaaagttatccttactcgtgctaatggctttttacccgtgctgccgtttttttaaacctttcttttcaaaacaattaacgtaaaatcgtcatgaagctgaaagtcctggagtctcagcaggctgtcgtaaatatttttgaccatatcctgcgcggagcagtccatatgttcttccagcatgcgctgaatgtcgctgcgttctaagaaaccgttttcggtacggcattcggtgacgccgtcagaaaaaagaacgatcatgtctccttcgtccatgtgctgttcatattggctgtaatcaaaatcctgagaaattcccagcaccaatccttttgcctccagatcataaaactttttttctttttcagagtagtagaagcccggttcatgccccgcagaggcatatgtaaattggtgatttttcgtattgtagtttgcgtaaaacatggtgataaacatgcttgaatccacgttctgttctacaacgcggttaagatttttcagcacttgggaggggtgaatgccgatctccggaagagagtccatggcatacttgatcatcgacatgcacaatgcggcgggtattccttttccgatgacatcggctatcgcgatgttaatcgattccttgtctttgacaaagtgataataatccccgctcatctgtttggcggggacgctgatcgccccgatatccagatcttcttcttcaggaatttttgtgccaagcagcgtctgctgaacatttgcggcaatttcaatttctgaacgaagctcctgctggatatctctcagactttgatgttcctgataagccatcccgtagccaatcatgacttctattaaaaaatccagcgaatgaaaaacatcttccggcagatccggatacagttcctttactacttttcggtggatactgataatctcctccggaggaacctgatgttcaatcgtttttcggctgaatttttgggcttgatataaagatgtttctgttaattcggctatatatcggctaagcagctgatgataccgctgctctataacctccctgaaatccacgttctaacctcctaccgaagccatttcacggcttgaatctctgttccttcctctgcaacagattgcaggctgaattcgtccatcagccttttgacgcccggaagtcccgctcccagtccgcctgacgttgaaaagccgtcttccatcactttacggatgtcggggattccgggtcctttgtcttctgctataattttaagaccttttttccctctgtcgtttacttgttctatgctgacctggcctttgcctgcatataagtaaatgtttctggccaattctgagatagccgtcgtgattctggcctggtccaccgtgccgaagcctaattccttcgcaacgttgcggccaagctgtctggcggctacgatatcccattctgtcatgattttcacacaggattggtcgttcatcgctattcccccaattcccgcttcaatgtctcaagcccttgctctaaatcgagcgccgtttcaatttcctcaagtgagattccgagttcaatcaatgtgaccgccacagcaggctgaattcccgtcaatacgacctttgcgcccatcaatttagacatggtgatgacatcgccgagcactttcgcgataaatgaatcgatcatgtcaacggatgtcaggtcaatgacgaccccgtttgcgccggtttcatagattttgttcagcagatcttcttgaaaatgcaaagctgtctggtcgtcaagttcccattggatggataccaataagcagttatacagtttcaggatcgggatttttggatgtctcacaatgttattcccccaatgaaacgatttttcgatttgtcatttcaagcgctgtttgaattcctttttgaagggtattcttcgtaataacctgcgacaaatcaattcccagattaacgatcgtctgcgcgatttccggacggattccgacgagcaggcatttcgcgccgacaagccgcaccgcttctgatgcctgaataatatggtgcgccaccatcgtatcaacgaccggcacgcccgtgatatcaattaatacaacctgtgaacggtgcttcacgacgccgtttaacagattttccataatgtgctttgcacgctccgtatcaatcgtcccgacaagcggcatgaccgttacatgctcaaataccgggatcagcggagccgacaattcctgaagcgcgattttttgcaaagtaaccgtcttttcccaggagatagaatactgatttaaaatttccgtattgatcggattgaaaaagctgtctatttccaaaatcaaatctgctctgtcctgatcggccatattaaggtcgaccatcgtttcgtaaagcagtttccaaaactctgacagggtggctgaaagaagtttcagtgacaggccgagctgaacggcgcgcagtgcgagttcactgatctgctcttccgtagcctcgtcatttttagtcgataataaaagaatgtctatatagtctttacaaatattttcacatatgtgattcgtaagctgatagtcttcctgattgcctacttcttttagtttggctgtccaagtatcaagcagttcatcatgctgatcaatgatgaactgatacactttctgattcgacatgggtttcactgacctcccgacacaaaacaacaaattttgtttgattatctctttattatagcgcttatgtttttcgaaaacaaaaaaagttgctctatatgagcaaccaaaatatgactaaaaatcaatgagtgccaaactgatttgcagggcttcatcaaccttatccatcatttcatcatccagatgagttattttatccgttaatctttgcttgtcaatcgtccgaatttgctccagcaaaataacggaatctctttcaaaaccgtagcgttttgcatcaatttcgacgtgggttggtaatttcgctttctgtatttgggctgttatggctgcaacaatagcagtcgggctaaagcgatttccgatatcattttggatcactaaaaccgggcgtacgccgccttgctctgagccaacaacaggagataaatcagcaaaataaacatcgccgcgctttacaatcaaaatgattatcctccgctgactaagcgctcaacggtcgtttctgcttcgcactcagcatagtgagcctcagaagagatattcaagttgattttcgccatttccatatacccgcgtctcatcaaatcacggttatggcgagttgtccgttcgctgacatacgctctcactgcttgtgatatcagttcgtttctgcttcgtttctcccgcatcgctacaccatccaattcagctactaagttttcaggcaagctgattttcatttcggttcttgcgctggattcagacaaaaaacatacacctccaccaaacttacggatacgaccaatacatccatccagacataatgataccattattcaaacgtcaagcaaagctgttttataaattctctttttccggatgacggctacttgcttgtattatcttgcagtaaaggatttcttacttccattatactctcattttccaaaaacatacggggaacgcgggaactaatggtacaagggacctcgtaattaatcgtcccaagccgcccggcgatttcatccatcgtgatcgtttcttccttctggctgccgatcagggtgactttggtgcccggcggataagattgatctaattcgaccatcaattgatccatgcagattcttcccgcgatgttcatccgtttgccgccgatcagcacagacgtgccgctcagcttgcggagccacccgtccgcatagccgatgggaaccgttccgatccattgatccttctctgccgtatatgttgcgccgtagctgacgctttcccctttgcggatctttttcacatgggataaaacagagtgcagcgcaaaagccggctttaattgaaacggaatttcgctttggatgtcagcagaaggacgaagcccgtacatactgatgccgaaacgaaccgcgttaaagaagccttttttaagacgaagtccggcagcgctgttcgcgcagtgcaccatcaattcttttaaaggaagcggagcgatcaatgttttaaagcggtcaaactggaagaggaaataatctctgtttttctcatccgcggtagcaaagtgggtgaatacgcctttacagactaaaccgggattttgaccgaggatttttaacacgctttggatttcttcctccgttttgactccgagtctgttcatgccggtgtcgactttcagatgaaacggcaatgttgcacttccgaggtggcgcgcagcttcctgaagccattcaacagaatatcccgtgagtgttacgtcatactcggcagctgcttgtacatattcgggcggcacggcgccaagcacgagaatcggcgctgtaatgccccgttttctcaatgaaatcgcttcatccagtatggctacggcaagacaagaggcacccgcttcaagcgcggctttcccaacttccaaatctccgtggccgtaagcgttcgcctttacaaccgccatgagatggacgttttgcccgatgtgttttttcatatgcgtgacattttctttaatcgcggacagattgatttccgcccacgtttctctgtaaaaggatgctgtggtcattcgatacacttcctagcattattttcaattcatattgttattatcatactaaaattattctgcaaagtgaaatggaatcaaaaaagagaccgacagcggcggcctcttttttgacgttattttgacgactgtccctgcatgcttttggcggcggccaccatttcatcttttgtcagatcctgtgatgacagaagataatccactccgtcatatgtccacgttaaagacgtatcagataatgccgcaaccgtgaagccgagattaaccggttcgcctttcagcgtgacggcagaggcggcttttgcgatatgggctttttcttgaataagggtgaatgatttttctccgccgtaagtcatgacgatccgtttgccgtccgccgttgaaatatctttctcttcaagctttttgacgccggccggcacttgaagcggtgttttgaccgcaaatgaatcagacggcttggcgcttgtggcgacgtccatctgggaaagcgtcatatttttcttctcgtcaaaagagtctttatcaaacggcttgttgaattcaaagcttttgaattcgacttttaccatcactttccggtctgtatccatgactttgacgagcgacgggctcatgtcctttttgttgaaagtgatttcctgagtcggcagcattttgttgtgctgatagtttgtttttgtttcaaacgtgtactttttatctttggcggaatagacggcgtctttgtcatgctgcacgtcttttacaagtgactcaaacaaatatacttggctgctgttattcggccagtcgctttggaatctgaagctcttatttaacgacggcgtgaggacaaagactccgttggcgttccgtaaaatgacttggttttggtcttttttcggattttccagatagacccggtacagggaaggttttttatgccagatttccacattgtatacttgcggatcactccccgtttcgatggtcattttggctttcgctttgtacgaggtgtattctttcgccttcttatctaaaccgttcacgatatcttcctgtgatttttggccgcaggccgaaagaataaggacggcaagcagtcccgttaaaagcaaaacaaagctttttctcaccttttttcaaccccttcttctcaattgatgtaaagggaagaaatcgcttgtttgactttaacggtacgccctgaacggacggacgcgtaccataaaagcctcaaacaacttgtctcccttaatgcactatcaaatatatgaaggggttccggctaatatgcagactagcgtgacaacctttcaatcacgacctgtgccgcggcgtattcttttgtatgggtaatggagacgtgaaccgccgcgcagtcaagcttggcgcaggccagcacaggctttcccgctttgtcgtttccggtttcaatatcctgaaagctgagctctttgccgatacctgtgccgtatgctttcgaaaaggcttcttttgccgcaaatcttcccgcgagaaattcaattttccttttgtccgacagcaatgtaaaacgggcgtattcagcctccgtcaatattctttgcggaaatctcgcctgccggctgagcatgttttcaattctgtgcagttcaacgatgtcgattccgattccgaaaatcatgtgaattcctcctaaaagtccgtactaaaaaacggtttatgtcataaacgtgttactatatatgtaacaaatcagatgcaaaggggcttgcgatgtttatacgaacggaaaatttccagacttttatcagacgttatccggccgtcagctgtatcttggcgctgcaggcgttcttgtggctgtttttcagtatgccgcttcattccgtcatgatgtggtcagatgctgtgaccggctataattacggcgtttcctcgggagaatggtggcggctggtgacaccgatgtttttacacgcgaatttcactcaccttttgtttaactccatgtctctctttttattcgcgcccccgcttgagcagatgctcggaaaagtccgttttctgattgtgtacatcgcatcgggcatcatcggcaatatcggcacgtatcttgccgaaccgcttgattatgtgcatgtcggcgcatccggcgcgatcttcggacttttcggcgtgtatgtgtttctgactgttttccgcaaggagctgatcggccgggatcagtcgaaaatgattatgaccctgcttatcatcgcggtgctgtcgacgtttatcaactctaatattaacattatggcgcatttgttcggactggcaggcggatttttgctttcctttttatgcgtgcagcaaaaaaagcggcggtattaaccgtccgctttttcatatgaataccagcgcccgatgcgttcggcatcttcctcgctgacatccttcagcatgacatgctccatgtggtgagctgatttcactgcggtagccacagatgcgagccgccttcttttttgcagaaaggagcggctgacttcaaacatctgcattcttcttctcagcataatcgtggtcgtcttcccgaccagcctcgtggtaatctgaagcctgccgccgtttatgcaccatgacgctgtcctaaacgaggcatatccaagcaccagttcgacgggaagcacaaggagcgatgcatatccccacggcttaaacagaatacaaagcgggatgatcacgaaaaccgagaagattatggatcggaataaataccggcgcagcgcccttttcggcaaatgattccggttttcttccagcacgtaatccggtgtgaaaccgttcagcatcactccgagctttgatttgcggatgatcggaaacagaatcgtctgtgctccttctttctcattccccgcactgcctgcgctgacaatcgccaccgtcgcgtatccgaataattgcctgatcacattttctttcattttaatggcttggattttacggagcgggattgtcacttgatgtttttcaataattcctctggtaatgaccaattcgtgttcctttttttctattttaaagttggcatgcttgatcatcataccggcgatgcttaacagccaggcgatgaacaatcctatgaaaatgatcacggcgtatataccgatgctcgcatgcttgagaaaagaaaacctgtcatagagccagtccatcggaagtacttcatcaatctgagaaaagagggcgaataccgctgagatgatgacaccgattcccccggatgttgaggcggccataagcagctcacctacagacaatcggtaaacggattgcacatcttccccgcgcatcggctcctgctccgctgcggtctcccctcgttcttcttgttccgctttttgctgaaaaacagccgctctgatccgttccgcctcttccacagtaatggcggataagacggcctcggcgtttttcccgtcgccagccgtttcgatttgaagcttaacaagcttaaaaagctgctgaatgatgccggcactcgtattcattgattgaatccggtcaatggagatgtatctctttttcgtaaaaaacaagccttcttcaattctgaattctccgtcctcaatccggtatgtgaattttctccactcgatcacactagccgtaatcagccagataagcaggacggcgagcgcaatgcctccgtaaaagcggatgaagtggttggagtttacaatatagacgagaaaaaatggcagaataatgtttttaatggtttcgataataatatggaataagttcaaaatcacggccgccgggtgcagacgtttcggctcagacatcatcttccgtcacccttgccagacgggaaatggaatccctcagccggtcagcttcctccatatcaagcgccggaatggaatgaacggttgccgccgtggaaattttgactgaggccagacggtaccttctgaggagcgggccttgtgaagtatctacgtgctgcaccctcaccatcggcacaatgacccgtttgacaataaaaatgccggattgaatatcaatttcattttcatggacttcatagcgccagatcctgtgcctgattttcggtatggcatagacggatatcactgaaccgaatatccaaatgatgccgaggactccggtgatccaatacggccaatggaagaaatggcttaaaacagctgctgctataacggccagaagacagaaggcggacaggatgatttcctgaagacgccagacttttaagccgcttggactgattcgattttttggctgtgctctcaacatacctacctcccattttttatcatacatacaaatacggctgatttgcaaaaaagattcactttccggcatatcaaaaaaaagcggaccccgtacaagggtccgcttcctgtgttttagtatgattttttctggcgtctgtcacctgaagaacggcggtcgcttgagcgttttttatcgtaggaagaacggttgttggttttccctttgccgccgcggtagccgccgccttggccgtctctgcgcttagaagtacgctggtttttatagcgtttgctgaccatcggcgcttcatcagtgaggcgtacaggcgtgctgtccggctcttttgtcgccattttaatggctgcagccacaactgtcactgcatcatgatcttctaacaattccgcagctgccgtcatgtagaagttcaggttgttttcgctgatcgccgtgcgcagacggtcaaccgtcacctgctgctgtccttctaatgcttcgtcaagcgtcggctctttcatacggtccattttgcgttttgtcgtttgttcaatcgcgcgaagcatgcttttctcacgcggtgtgataaacgtcatcgccatacccgtttttcctgcacgccccgttcttccgatacggtgaacgtagctttcaggatcttgaggcacgtcaaagttgtaaacgtgggtaacgcctgagatatcaagtccgcgggcggcaacgtcagtcgctacaagcacttcgatcgcaccttctttaaatttacgaagcgcaaccatacgtttcgcctgcgttaagtcgccgtgaattccttcagccgcatatccgcgaaggttcagggcttcagcaagctcatcgacacggcgtttcgtacgtccgaatacgatcgcaagttccggagactgaatgtcaagaagacgagtcagcgtatcgaattttttgcgttcctgcacttccaagtagaactgctgaatgtttgatacagtcatttctttcgcttttacttttacgtgttccggctcagtcatgaaacgctctgcgatccgtttgatcggcgcaggcattgttgctgagaataagagcgtttggtgctcgctcggcacgtttgagagaatggattcaatatcatcaatgaatcccatgttcagcatttcatcagcctcatccataacaaccgtattcacgttgtttaaacggatcgtgcggcggttgatatggtcaagaagacgccccggcgtacctacgatgatatgcgggtttttctttaatgcgcggatctgacgtccgatatcctgtccaccataaataggcagtactttcgcacgcttatcttgtccgattttatataactcttcagatacttgaatggctaattcacgggttggcgcgattacgattgcttgaatattaggagactcggggttcattttttcaacaaggggtataccaaacgcagctgttttacctgtacctgtttgcgcttgtccaatgacgtctttatttgaaagtccgagcggaatcgtttgtgcctgaatcggcgttgcttcttcaaatcccatacgattaattgccttcatgagatcagaacttaattgaaaatcttgaaacgttatagtcaaattattcaaactccttctaattgctgtttcagtaatgtcgtgatttaccactaaaaactgtcctttcattcaaaagacaggatcgtacgtatacaaagcccgaattactttacgtttaatcttaccattacagtatgtgtttttcaataaggcgagatggtcaggcggccggaagcggcctgaccggattcttcccgcgaatgatgccggcccccgcaccgtgcgggttttcccagccggcgggatttctttttcatacggacagaattatttcaccctgaattagtttcttcatttttgataattttataatgctgatcggtattttttcagttcttctctaataaatctttaacgatttcttcgagcttcatacctcttgatgctttaaacagcaggagatcgccggaagcggcacttttctgtatcgcgtgaagcagttcttttttgtcaagataatggctgacgcgcccttcttcaaaatgccggcgcgctccgtcagcgatgaatgcgccgagtgtgccgtaagtaaatacatgatcgatttccgccggattgatcgcggccccgcattcttcgtggaatgctttttcattatccccgagttcaagcatatcaccgagcacgagcattttcttccgatagcctttcatcgtttcgattaattcgaccgccgctttcattgacgtcgggctcgcattatacgcgtcgtttacgattgagatgccgttttccgttttgaccagttccaatctcatacccgtcaccttcaggcggctcagtcccagagcggcattttccggcgtaatgccgaaatagatgccggcggcgtatgcggccatggcattcatcacattatgtctgccgagaacgggaataaagaaagaacggtcgattccgtcgatattgaagtacgtgccttcttccgcctgttttatttctttcaggcggagatcattgtccgcgcctgcgccgtatgtcgttgtccggcaagtgtacgtcttttcgcgaagtagcggctcatccccgaaataaaacagaacgccgtcttcccgaagtccgtttataatttcaagtttcgcctccgcaattccttctcttgagcctaaatcctgcatgtgggattcgccgatattggtaatgacggcagcttccggttcagcaagacggctcagaaaatcaatttcgcccctcgcgctcattcccatttctaaaacggcgatttctgtatcttcaggcatggcaagcacagtcagcggcaggccgatatgattgttgaaattgccggcggttttgtgaacgcggtactgcgtgccgagaacggcgtgaagcatgtctttcgttgtcgtttttccgttgctcccggtcaccccgataacccgtgtgccgagctcttccaaataagcttttgccaatgtctgcagcgcctccagcgtgtcatcgaccaagatgacagcacgctcctccggcggattcgattcggagcgttcccacaacaccgcggaaacgcctttttcgaatgcttgcggcacaaaggtgtggccgttaaaatgctcgccttttaaaggaatgaacagctgatttttttccaaagtccgcgtatccgttgcggcgccctcaatcattgtttgttcaaatacgggatttgtcagtgtgcctttgaccatgtctgcgattcgttttacagttcgctttatcaaagatggcacctcgctttctgaaaatgttgtctgttacgggaaaagacactgccccttcaggcagtgtccgtcttcattaaaatgtatgtttaatcagctgtttttcggcatggcgttcttttgccagctcaaccagctgttcgatcagatcactgtactctacgcctgcttctttccaaagcagcgggaacatgctgaatggcgtaaagcccggcattgtgttcacttcgttaatgagcacttgaccgtcattggtcaggaagaaatcggcgcggacaaggcctgatccgtcaatcgctttgaaggctttaatcgccatctcgctgatttccgcatattgttcatccgtcacttgcgcgggaatcattaaatccgtgtcgccgtcttcatatttcgctttgtaatcgtaaaagtcggttttcggcgcgatttcaccgacggcggagcatttcggttcgtcatttccgagtacgccgatttcaatttctcttccggcgattccttcttccaccacaattttccggtcatactcaaaagccagttcgaaggctttttcaagctcttcacggtttcggcatttgctgattccgacgcttgatccgaggttcgccggtttgacgaagcacggatatcccagttcttcttcaacctgctgtaagcagctgtccggcgtctgtttccagtccttttttaagaaagcggcgtacttcgcctgcggaagccccgcttgagcgaacaaatgcttcatgatgactttatccatgccggctgatgatgcaagcacgccgttgccgacataaggaacgttcagcaattccagcagaccctgaatggtgccgtcttcaccgttcggtccgtgcagaagcggaaatacgacatcgatcggcgccttttcgtcagtcgacgcttcaggaaacatttcccggttcaatgctgatagagcgaaattttcaccgttttgttccagctgaagcattttcacgttggaaaccggctcagtcagcagcgggcctctttgccattctcctttttcagtgatgtaaatcggatgtatatcaaacttctcagtattaagcgcttttgttacagctaatgctgtctgcagcgatacattgtgttcggctgactttccgccgtacaccaatcctagacttgttttcaatggatattccccccacaacaattcatctttactatcttatcactttcctcagaaaatgatctaattatttttgggcattctgaatatgaaagcatttgtatgtaattcctttttattttatattaaaatggcatggaaaaggagatgtgtcatatgaaaaaaatcagtacaacagaacaatttaatgaacttattcaatccgacaaggaaatcatcgtgaaatttttcgctgactggtgccctgactgcacgcgcatgaatatgttcatcggcgatattttggaagaatataatcaaaatgattggtatgaactgaacagagacgagctccctgagcttgccgacaaatatcaggttatgggcattccgagccttctgatctttaaaaacggggaaaagaaagcgcatcttcacagcgcaaacgcgaaaacgcccgaagaagtcacagagtttttatcacagcatatttaattcgtttcacgatctttgtttatgacttcaggctctacatgaacatggacatgagtcacatcatgttcatgttttattgcatattcgacctcatcggctacttcatggccttctttcacagacagtcccggatctaccgtaatgaccatttccacatgaaccgtgctccctaagtaccttgctttcacatccttcagcctgctgacctcttttatttcttttaccgtgtgtttatacggctccaaatctttcagatcaaacccgtccgtcaatgagtgggaagcatctttgaagatgtcccatgccgtcttacagatgatgattccgatcagaaaagcaatgaccggatcaatccacggcagatgaagccgggcggttaagacgcctataaacgccccaatactgacataggcgtcagaacggctgtctttcgccgccgcatgaagcgcagaacttttaacccgatccgcaagtcggctgttatatacatacatgccgtacattacaatcgcgcttccgagcgccgtccatgccgcaatgaagctcggctcggcctccgttccgctgacaatcgcctttgctcccccgatcagcacttcaataccgaccgccatcataataaaagacgcaattaatgaagaaattgtttcagcccgataatgtccgtaggcatgatcactgtccgcggggcgctgggaaatccggagcccgatcagcacagccagtgatgcgacaatatccgtggcattatttaacccgtccgctctgagcgcttcggaatgataaataagaccgatcaccagtttgacggcggcaaggatgaggtacgcggcgatattaagaatcgcgcctttctcaccccgttttaagtttgccgtttgatcattcatgtaaggactcctccattctcattcatagtatggatggaaaagcggaaaaatagcagctttgatctgagcaaatgcaatattcgacagcattattccccgggaaactttttgtcgaaaaattggcggtattttccctttacatatgaatatgcccattgtatactttcattaactgataatgattctcaatatcatttgattaggagggtaatcatgaggtcttctcctcagctcagatcatcagttgaaggacgaaaaaaacatctgatccatttgctgatcaataacggaatatacaaaaagtcggaacggcatttatatgaattatcgctcggagaattagaaagcgaatacaaatatgtaaggaaggtgcgggctcatggcgaaacgtaaaataaaaacatacgaacagctgataaaagaaaacaaggcggccattatgaataatcaaaagctgatgaatgtgatctatgacagaattgaccgcaagcatcaaaaactgctccggcacaacagccatacataaaaagagcctttttcaggctcttttttttattgctcaaaggcttccgccgctaatttgccgatgaccgcatcgtccatcggcggattgtgaaggccggcccgggcatcccgataataccgctgaagcggattgtttcgctccaggctttttgcgccggtgattctcattgctttatcaacaacagaaaggaccgcatttgtcacaatatgttttgcggcgccaagctcgcttttgatgaaaggacggcgtttcgggtcatcatacatttgcgccgccgtgaagagaaactgtctcgcttttaacaattcaagctccatttccccgacacgctgcccaacggccggcacgtctttaatcggtccgttcaggctgttcggcgaatattcggatgcaaaccggacggcatagtcccttgccgcttgagcgatgcccagataagcagcgggaatgtgaagcagccagccattcactttcgccgctctcggcccgctgataagctccacaagccgctcgtcactgaccatgacatgatctaaaaggagatcatggcttccggtcgccttcatggcaatcatatcccatgtttcctcgactgaaacgcctgcctgatctttatgaatgagaaaaacaccggtcgtttgtttttcttcaatccatgccgtcacaagcatataatccaaagtcagtgaaagggttgtaaaggtttttcggccgttcagcacccattttccgtcttttttgacagcggaggtgccgggtcttcctcccctcgtcggactgccggtctgccgttccgtcgctgccctgttcaggacagctccctttttcacctcttctgtgataaatgaaaagacatcttcatcccagctgtttccttctccgagctcacccatgacggataaatgccagccgattccgagagcaacggccgcgtctcctcgcgccagccgttcctgaaacagcaccatatcataaacgggaatgcctgcaccgccgaatacctcaggtaccgttaacgccgtatatcctgcgtcgcgcagtctttgaattttctccgcgggaaaacggcccgcctcatcatcaagcgcggctgttttttgaaattcgtctgcaagcaggccgattttttccatccattccctctgccgttcattctgtatccataaagacactggaatccccccattataattccgataaagttaataagtattatagagattcaagtctcgtttcgcaactgtgaggctgtacaaaaaaacacgctattccatggaatagcgcgttcagactgcttccgggccgcggtcctgcttaagcccgagataaatcagcatatatgtgagataacccatcgtcatcacaagcccgccaaagaaaaagcttgaaaaaatcggctcttcaaacgcggtaactgccgcaagcacgatccagcttgcatacaggtagatgatgaaataacggaatcccgacttcattttatataagagaaacagccccactgtagaaaacaaacccagcgcaagcctgaaataaacaagatgttcgaattggaacatgaatgacacaaaggaaaaaccaagcaataacacaatcggtaatgcggtaataaaatttctcaagtgagcacctccgtcattacctttattataaatcaaaatagcataaattattgatttatcgtgatctttttcacaaaaatgtcattcctttactttatacccgaacatcgcgtttgcaaaagctccaccaagctacggctaagaagaatacgatatggataatgataatgcctgtggaaaataacggcgtcattcccgcaaacagcggtttcgccccgctcatatattgcgtcaggtcagtatttgcgaacagcagaaaacttccccatttgttttggaagagcgacataatcgtcacgagtgattttgcgccgtacagcacgataaatgacaaaatgacggccgttgcgctgtttcggaatacagaagaacacaacaagccaaagcatgccatcgcaaacgcctcgacccagttcgtgccgattactttcagggtgttcataagaagcgtccctgattcagatgtcaccgacacgccgaagaaagccatgccgaacagcagagacagaatatagtacgccgcatacaggtacaagctgaccaaaaatacggtaatgagtttagatacaaaaatccgctcccgctttaccgggcggattaacaaaaatttgatcgttttcttatcaaattcagcggaaatgatcgttgccgcgatcacgattgttaacgcctcaagcagaatattcagcccgggcgcgtacgccatatagccgatgaaattctcatccgttccggaactgatgacaagccgtttaatgacaagcgccataataaattggagaacggccatcagaatcagtgccactaatgagacttttcggttaaagagtttcatatgctcattcgctgtcaatttaaacattcgtctccccctcctcttgaagcgccgtcgtcactttcatgaattcatcctccagcgattccgcatacggcatgatggaatacacgagaaagtcttgtccgacgagcgcacggtttaatgccgggatgtccttcttcgctacggtgacggtaatgcccccgccgtttttctccggagcaaattgctgctgggacagccattcgaatgcttcgtcagccggctgaatgtcgaggacggctttttcttctttttcctcagcgccgcgcagaacaacctctgttttgatctcacctttttgaatgatgatgacacggtcgcaaagatcctccacttcacgcaataaatgcgtcgcaaaaaggatgctcgtcccttcaagctccgcgagttcctttaagtgatcgcggaaatccttcattccgcccggatcaagcccgtttgtcggttcatctaaaatgagcagattcggacggtgaagaatggcctgcgcaatcccgagacgctgacgcataccaagggaatacgttttaactttgtcatgaacggcattggtgagcccgacccgctcgatgacttcctgaagcctgtcctctttgatgtttttgtgcatgttggcaaagtgcttcagattctcccaccccgtcaggtacgggtagaattcaggattttccacgatcgctccgacggattcaagcgctttttcgaaatcagcatcgtgctgaaagccgttaattgtaatcgtgccgctgtttttctttaaaagaccgacgatgattcggataagtgtggtttttcccgacccgttcggaccgagcaaaccgatgatctcgccctgcctgacatccatgctgatgttttttaaaatgtgctttttgcctattgttttgtcaaggccttcaatatgtaaaatcggctcagtcatacagccttcctcctttttcacaaaaaataaacagtgcccgtacataggcactgtctgcattataacattagtcatatattcgtgaagagccggagccgacgttatgtcttatccgggaccggtccgtttttttccttctcttcattattgacgacatccagaatatcgagcaggaacacaaaaatcggaattccgataatcaagccccaaatgccgaagaaatgttccgagaaaatcagaactgtaaaggtaaaaaagatcggcagttccgttttcgctgacatcagtttcggattaaggaagtacgtctcaatcgcatggatgacgaaaatgaccagcacgatgtagatgacatacgctgcgccgcccgtcgtatacgcgatgatgctgagcggaatgagggaaatcaccacacccgcaacgggtattaacccgaggaaaaagaccataatggacaggccgaacagctgcggaaaatgcagaatcgccaatgcgatcaaggtgaggatacagttcaccagcgcgataataaattgggcttcaagcactttgccgaatgttctcgcaaacttgctgccgaaataagcaagttcgtagtaaaaaacagacagcttgctgtgctgaaattttttcataaactccgtgagccgctttttctcgaacaggaaaaacatgctgagaatcagtgacatcacgacctgcaaaccgaaagtgctgatatcggccaagtatgtatacagtacattaaaaccttcttttacataggaaccgatattgatatcgccgaacacgctcgatatctcatcataaaacggaatgacatcgggatgatacgcgatgtgcttgatctgcttaatcagctgttcaatctgcttggcaacaatcgggtaaaagacaaagcctccgacagtcgccccgacagccagcgcaatatataaaacggtgatgaccaccctctggctgatccggaaaaaatggttcaacacgtgccggatgacagtctccagccgatccatcagaaaagtaaaaataaacgtaagcaaaatcaaattaatcatacttcggaatacaactaacaccccagtcaaaacaagaaaaacggaaaaacgtctgacacccggatgctgaaaaaatttaaaaatagccgccatttatacactcctgctaggacaaaaagcccttagatttcatctttcactctctaattgtaaattatataacaaaatgacgctaaggtctttgtccacctcctaataaatttaaacaaatttatcttttttactcatggcggccgaaaaaaagaacggcatgcccgatgcatgccgttcttttccttttataccgccgttttcatttctttaacggcctgtgtgcttttcacttcgtcaaactcattttcgctcttggctacgatgatggtggcgattccgtttccgatcaggttgacgatcgcccttccttcactcataaagcggtcgacgccgaggagcagcgccagcccctccagcggaataacctgaagcgccgataaagtggaggcgagcacgataaatccgcttccggttacgcccgccgcgccttttgatgtcagcatcagcacgagaatgatcgtaacctgctggccgatggtaaggtcaacgccgaacacctgcgccagaaaaaccgtcgccatggacagataaatcgaggtgccgtccaggttaaaagaatatcccgtcggaatgacaaggccgacaaccgatttggaacagccgtagcgctccattttatccatcatccgcggaaggacggactcagaagagcttgtgccgagaacgatgagcagttcatctttaataaaacggagatagttccacaagctgaaaccgaatagtttgcaaatgatattcaaagcgacaaatacaaacaggaacatcgtaacgtatacagacagcatcagactcgccagcggcttgatggaatcaaggccgaagtgtccgatcgtataggccatggccccgaatgcgccgatcggcgccgcgcgcatgatgtagccgatgattttgaaaaaaacatgcgacagtttatcaaagaaatcaataatgcttttgcctctttcaccgagcgccgccaggccgacaccgaataaaacagaaaagaataagacctgaagaatgtcgccttttgcgaaagcgtcaaccatatttgacggaacgatgtgagtgataaattcaatccagtcaatcccctgtcccccgttttgcgtgtactgagagacatcccctttttcaagcttgctgtaatcaagcccctcaccgggtttcatgatattgacgaccagaagtccgataataagggcgatggtggtcacgacttcaaaataaataaatgcttttcccccgactttgccgacttttttcatgtctcccatcttggcgatgccaagcacgatcgtcaggaatatgatcggtgcgataatcatttttaccgcattgataaatgtatcgccgagcggcttcatctgcttcccggcctcaggccatacgagtccgacaatgacgccgatgataaccgccgtgatgacctgcaccgtaagatttttgaaaattttcatccctactcccccttgcctctcgctgcgtctatacaaaaatgatagcgttttcaaacgaagaggggaagcttatgatcataacggacattttggtctttttggtctcggctagcggacgaatttgtagcggttaaccggccggcccactcccccgtattgaatgtcgagcttaatctggccgtctttttcaagaaaatcaagataacgccgcgctgtcaccctggcgattccgagcgctttggcggcttcttcagctgaaagcggctccgtctgctgtttcatataggtcaaaatttcattcatcgtaaaatgatttaaccccttcggcagatcgcgggacggattttgcggaattttaagcagcatgtcaagctgctcttgcgacatggtgtcatgctcttcaattttccgtttatattgtttatagttttcgagcgcctgtctcatccgctccagcttaaacggcttcaaaatatagtcggccgcaccgttttgcagcataagctggattgtttctttgtcttttgcagccgagacgatgatgacgtctacttcgagcttttgttttctgatttcctggagcgttttaattccgtcttttttcggcatgtatacgtctaataccacgagcccgggccgcagatcttttataagcctgattccctcgtctccgtcagcggctgtggcgatgacgctgaaccctgaaacaccggtgataaattctttattcacctcctgcaccatcggatcatcttcaataagcagcaccttgatgtccatcgaatgattcctcccccttcatcggaaataaaatagaaaatgccgttccctgtccctgccgtgtgtcgacttcaataacgcccatccctttgtcgacgatttgtttgacgaggtacaagccgtatcccgttcctcccgttttattgacggtaaaccctttgtcataaaggtgcgggatgtgctgatcggaaatcccgcttccgttgtcttctattaatatagcaagcacttcatcattttgctcgatactgatgtcaatatgtttgtcctccgtgtccgctgtttcgaatgcgccgaacgcattttcaattaaattgccgagcaggacgacaatgtcatgctggtcgacatgctccggaaatgccgagaaactgctgttttcatcaattttcacagaaatgccaagctcttttcctcttttgattttgcttaacagcagtcccgccgcagcgtcattctgaatggcctgatgaagaaaatcggtgacgctttcttgttctgatgattccttaaaagcaagctggagcgctttttctgattttccgagctgaatcagtcccgcgatggtgtgaagcttgttcatatgttcatgattttgaactctgagcgcatcgacaaaatttttcacacctgtcagttcttccgccattttcgccgcttccgtcctgtcctgaaaaatggcgacggctccgatgaccttctttttcatgacgatcggaattctgctgctcatgatcacctttccgctgacttggatttcttcattatatacggctcggttccgctcgacgatctcagggagccgcgaatcttttaacacgtcccagatcagcctgccatcggtctcttgtctgacattgaatatctgcttcgctttttcattaaaaatggtgatgtgatgctgattatcgatcgcgatgacgccctcattcatcgaatgaaacgtagcggtccgttcctcatacattctcacgatctcatggggctccagccaaaacatttgttttttgatgtggcgggccagcaaaaaggagccggccagtccgaacccgagcgccagcagaacgataaacagtatttcatgtttcagctgaagaagaatttcaccgaatccgggcagcgttttaccggccagaacgaccccgatctgattcaaatcccggtctttaatgggataaaaagcgcggacggcggtgccgatttctccctttgcttcggaaaaataaatgtgctcggcgaacgccgcggcttcgtcctcaccccttgaacgctttccgatcattgtgctgacgggatgtgaatagcggatatgatccatatccatgacgacgatgtagtccgcttcattgatgatccttatttcttcgaccgcatggcgcacgtcttccctttgttttttctgctcgagggcgcgtttgacatcggtcatctcagataccgtccgcgcggtattcatcagccgttttttcagctcgcgctcctctgtatgctgaatattgccgatcagcacgatgccgacgatcaaaaaggtaaaaagcacgacgatatacgaaagtatggtgattttccagcggatggtgagcttttttttcgtcattggcctcttcctttccgtctctttacgaaaacggcccgcccgattatgcttgttatagaaaatggcggagggggttttcgatgaaaagcttgctgacttgtctcagcctgatggtactcggtatcggaaccgctttattcatcggctttcatgatcgtttctcaacggaagaaccgtattatgatgacgaacaggaaggcctgaaagatcaaatcgttttcaaattcagccatgtcgttgctgagaacacgccaaaagggcgggcggcgaataagtttgccgacctggtctatcaaaagtccggcggcaccattaaagtagaggtgtttccaaacgggagcctctattcagataatgaagaaataaacgccctccaaaacggggacgtgcaattcatcgctccctccacctcaaagctcggatcactgtctcccgaatggggtgttttggatctgccgtacgcgtttacaaactataaagccgtgcaagaaggcctcaacggcaaaatcggcacacgcctgttcgcttcattagaaaagcatcatttgaaaggactggcgtactggacgaacgggtttaagcagcttacgtcaaataaagggccgatcttcactccggacgatttgaaaggacaggcgctcaggatcatgccgagcagcgtgatcgaagaccagtaccgcctgctcggcgcgcgcccgcggcaggattcctttaattccacgtttcagctcttggaaagcaatcttgtagacggagaagaaaatacgatttcaaatatctattctaaaaaattttataatgttcaacattatttgacaatcagcaatcacgggtacctcggttatgccgtgatgaccgacgagcatttctggaattcgcagacagaaaaaacgagaaccatcttaacggaggcgatgagagaaacgacggagtggaacgaagcctccgctgagaaaatgaataaagaccagcttgaagagataaagaagaattcatccattcatattcatgtgctgagcaaagcggaaaagaacacatggatgaaacgcctcgacccgatttacggacaatatgaacaggtgatcggccgcgggcttgtgcaggatttgttatccttgcgccgcgagccttagcaggaccaatacgcccatctccgtttcatcccttttcccgccggggaagtaaatagggacagagcaaaaaaaggagatggagacatgtttacacatacgaaaaaactgcagcatccggctaaaccggatcgtcctgacccgctgttcgcaaaaaagatgcaggaaattttagggggacaatacggggaaatatccgtcgccatgcaatatttgttccaaggatggaatacacggggcaatgaaaaatataaggatcttctgatggataccgcgacggaagaaatcggccatgtcgaaatgatcgcgacgatgattgcgagactgttagaagacgccccgctggcagagcaggaaaaagcggctgatgatccggtcatcgggtccattttaggcgggatgaatccgcatcatgcaattgtctcaggactcggcgcaatgccggagagcagcacgggcgttccgtggagcgcaggctatatcgtcgcaagcggaaaccttctggcagacttccgcgccaatctgaacgccgaatcacaaggaaggcttcaagtcgcacgcctgtatgaaatgaccgatgataaaggcgtgaaagatatgctcagctttttattggcccgcgataccatgcatcaaaaccaatggcttgcggccattaaagaattagaagaacaggaaggtccgatcgttccttccacattcccgaaggcactggaaaaacagtcattctcccataagcttattcatttctcagatggcggagaaagcgctgaacaaaattggctgaaggaaacagcgccggacggagaaccatttgaatacgaaaaggaaccgaaagcgcacggcgaaatagctaagctggatcccgtcccgccgtatgtccacaacacgcttcccggacgcgagtaaagacacaagcccaaaacaaactgttttgggctttcattatgccttcagaaccgtccagtccggttcatatcggatgtcagggtgatgtaacagctcgtgaatgacaggttcatcctcttcatacagcatcacttctattgaaagaatcgcagccttctgctcgttttcttcgtatatgcggtcatgttcgttctccataaaatcatcataggcctgtctgttctcctaaacgctgatgatctctgcgatgaacaggccgtctgcgtttttccgccacccgccggcctgtttgacgaagccatttacacatgataatgctccccaccttgactgtgcttgcgcaaatgcttcagcgtttgcagcgtctgtttcacatacaatttttttgatcagcatgacgttcctctgtgatgactgttttcgcacgcgtatgctcaacacacagattcacggttctgacgtaagagcgggtgcggtgaatcgtgcctttcgggatgagcaggctgtcatttgctttgagcactgcggtttctttgtccttaaaatcgatcagcagctcaccttccagaacgatgaaccattcatctgagtcagggtgatggtgccagtcatattctcccgtaaacactgcgaggcgcacacagtggtcattgatctccgcgattgaaaaattgtcgtgtttttctttaactttattggcgatagcgagcaaattcagcatgtcagacacgagtgaaaaacccctttttcatcttattgtatcgcaacggcggctcagattaagattttcccaaaataaaaagcgatccagctgatgcgccggatcgcttttgatctgcaggttgtctgccttttatgcttttattagctgcttcgtctgtttccgcctttttggccaatttccttataaaaatctttgtcatgatttttgcttgtggcttctccgcctttttggccgatttcttgatagaattccttgtcatggttattgctagtggcttctccgcctttttcaccgatttcctgatagaattctttgtcatgatttttgctagtggcttctccgcctttttcaccgatttcctgatagaattctttgtcgtgatttttgctagtggcttctccgcctttttgaccaatttcctgatagaattctttgtcatggttattgcttgtcgcttctccgcctttttgacctgcttcttctctgctcattttgttattatcttgtgccatttttgaattcctcctttaattggtgttggttgttggtttcccgatttcagaactgctaaacaaagaaaacacattgaatgtgttttcgggtggttttttatcattctgtatccttcatgcgttttagaatccggcgttttttatagagcatgatgcctgtttccgcgatgctttctaaagctgaacggttggcggacgcgccgaagatgatgcctgcggccggaaccatttgcagcagttttttcgcggcgaacgtatcgcggtagctgtaaacgacttcccgccagccttggatttgcgaggcgacgcgctgataggcgcggtcgttttgatcatattgccgtaaatcttgcaggatcgctttttttccgatgacgtcactggatgcaagctggagcaatttgacgataaacacgcgttcttttttgtctttcggatcaaagccgtaagcaaccgcgatatcctgcagcgtctttaaggacaggccgagcatcgccggaatgtctgccgccagcgtgaatacgccgccgactcccgttgcggctccctgcaccgtcgcggcctttacgcttgtacgcgctatggcttctgcgatttcgtccatgacggcaagcggcgcattgcggatgtcgtgaagcgtttgacatgtaccgtgcggcagccgtttttgaaactttttcatgatgcgcttttctgatgtcaggtactgtccgcctgactgaataaacgttcccgtttcatcgagaatgagtccgattttcctctgaataaattgcggtgtcagcttgtccaaaagctgaaacggcaagcgggtgaatgtttgccagaacatccccctctgctgcgccttttcccatttttgaatgtctctcagttgtctttccaggtctgtccgctcttctgtcacccgtcctgcacgtcctttctgatttctttcttcatagtatacctttatggcgttttctttttacacccggacggattttttatccggaaaatatcccattgtttaattttcttcaaattctgtatattgtataattttgaataatacgattgaaggagaatgttgaatgcaatggatttatttaagtttagcgatcatttttgaagtattgggtacggtcagcatgaaattatcaaatggatttacaaaacttgtcccaagtattttattattattgttttatatcggcagcctttgttttcttactttgactttgaaatatataagtgtctccatcgcgtatgcggtctggtcggggatggggatcgtgctgatttccgtgatcggaatttttttctttcatgaacagttctctgtcataaaagccgtctctgttcttctgatcatcatcggtgtcgtttccttaaactttatttctgaaagtgaaacgtcatcaaacggcatcagcgttcatacggacagaaacagatgatgaaagggttaaaggttctcttcctcattacagatattggatttatcgtttattggattgttactttttttgagtggattccaaaaaacatggtgtttaaagattatgataacgccatgatcatggcctggaactggtcattctttcccttagatattttcatttcgataaccgggctgtacagcttgtttctttataaacggaaacatgcgttatggcgctctttcgcattaatatcacttgtgctgaccttttgttcaggcctgcaagcgatagccttttgggtatttatcggtgattttgatcttatgtggtgggcattcaatctgtacttgcttctttatcctttatattttattcagaaattgctggtctctcgtaaaaatagctgtcattctttttgatgaggcggttttctttttcttcaggcgggaaacacttttcataaaggagtgatagagatgccttggtctatgaaggattatccgcaatcattgaagaatctcgaggaacctgtgaagaaaaaagcgatcgaaatcgcgaatgcgatggtagatgagggttatgaagaaggacgggccattcccattgcgacaagtcaggcgaaagagtggaaaaaaaacgcttctaaggaagaaatcgatcagctgatgaaacacgatgatgaaacgaaacgcggaaattgaatcggaataaaggaaaaaccccgctctcaagagaacgaggtttttctgattataaaccgtaataataagatagcgtggtgactgaaacgtagcctgtcgctcctgcatacgtgactttcagccatttattagaattggtgtagtggccttgaacatattctccggttacccaagaaccagtaatttttttaccgcttgagaatgttgtgatcgttgaacagctgaccttagagcatgagcgcatattagcaccgtaaataccgactgtgcccccgctggctaaaatggaaacgtccggttcagctttaggtttgaaagctgctgctgatgcagagccgccaaaagcgaataaagaaacagcaaaaatcatggctaaagaaatgatcgacaaacgacgtaccaagaaaattccccctcttttatcatatggccggaaagctttcctgacgttattatactttttcgcccgggagactgaaataagtctaatgctccaacttcttttcttcgcaagtgaccatgccgattctttttttgatagataacagcggtttattagactggaatcactgaaatatcgttgattcaaacgtttattcagagcggccggagtttttccggaggtcatttgaatggtacagaaaggttttatcttccaatggaaagaaacattattattctatttacccgggaaaacggaggaaatacagcgtctttttctcaaatcagttgggcggacagaaagttgtgaagttatataggcaagtgtcctcttttcacctttttaaaagaacgctccacgcatccgcgcatgatccgacgcggaaacacgctttgcgaacggcatcgcttctttcccggaacgatgccgttttcattttcggacctttcttcggcgggatacatatcatagataaaacagggcatcaatgtgccggtttattgaacataaagaacttgacatcttataatagcggatttatgatgtagataaaataatttgcatctaggaaactttttgttatttagctaaaaatctatcggaatttaggtgagacataatgagcaaagacatctcagcacaatcactgcaagcaaaagccgtgcaggatgcacttgacggcaaaagcaagggattcaagcggcttctgccttttttaggccccgcctttatcgcggcgattgcctacattgatccgggaaacttcgctacgaatatctcagctggttcgaagtatgggtatatgctgctgtgggtcatcctcttttcaaacttgatggcttttttaattcaagttctttccgcgaagctcggcattgccacgggtaaaaaccttccggaaatcgccagagaccggtatccgaaatgggtatcagccgggctgtggatacagggtgaactggtgattatggcaactgatctggcagaatttatcggggcggcgctcggactcaacctgctgttcggcataccgatggttgaagcggccattatcgcggcgatcggatcattcgcgattttagagctgcagcgccggggttaccgggcgctggaagcgggcattgccggacttctgttcgtcgtggtgatcgccttcgctctgcaaaccttctttgccaaacctgacgccgcctccgttctcgaggggctgtttatcccgaaaattgacggaatggacagtgtgctcttggcaaccgggatactcggcgcaaccgtgatgccgcatgccatttacttacattccgcactgacacagcgccgtgtcgtcggaaaaacggatagtgagcggaaaaagatttttagattcgagacgattgacattctcatcgcgatggtgatcgccggggcgattaacgcaagcatgctcatcgtcgctgccgcgcttttcttcaagaacgggctgtatgtagaagatttagacgtggcttatcagcaattcggccactatatcggaccggcttcagccattctcttcgggatcgggctgctggccgcagggctttcaagctcttctgtcggcacattgtcaggcgatattatcatgcagggcttcatccgttaccgtatcccgctttatttgcggcgtttcattaccatcattccgccgatgatcatcattatctcgggggtcaacgccacagaagcgctcgtatggagccaggtcgttctttcattcggcatctcctttgcgctcgtgccgctgattatgtttacaagcaacaaacgcctgatgggcgccctgacgaaccgaaaatgggtgacggctctcgcctggctgattgcggttttggtgatcgcgcttaatctgtttgtgatctacgattcattccgttagaaaaaaaccggccattgcggccggtttttcttttgacgccgggtgccgttcgtatctttttccgggcgtttttggtatgatagaagaaaaatcggagttttgcttatgtcagtatttatccttttttatctgtggattgtgccgattgtcatcggcatcttctgttctctttttgcttatcggacaacgggtaagaaacgtctgattcccggctttttgatgatcgcattaagcatcgtttccttaatcacggggctttggatcggcggggtgaactatcatgtgttcatcgggggcatgtttttattcggtacgttattggccggctccgccttcccgtttttcttcgctctttcacgcaaacgaaaataaacaggcatgctgcctgtttatttttattcattaaccctaaattataaaccgctccgataatgtgattccgcctcaatcagcctgtacatgtgttatataggctccagcccatgtcccatctcatcgaaactgcagccaaaatgaatcctactaaagaagattttgaattataagaaaaatactgtattaaaatcctatttaccccaaaaatacctattgatagaatggtatctgagaggggaaaatgttcaaagcggatcatatcggtcccgcctaaatacatagtctttcatttctctctacactacatttctaaaggaggatttcccattagacacgcagctaaaggcattctgtttgccgcatctttagcccttgtaactactgcttttgtccccgcatccttagctaaagaaaatcataataatactgccaatgccactggaacgaccaaatcatttttttatcagactgatacgcaattttcctacggacttaaagcacaaagcgatgcatctgtgtcaaaaccagtcaaagatgtaatcagagaagtgctgaaaaataaaacaaaattattcaatcttgttgaaaaattagcaggaaagaaaataagaaatgaactcgaatccgttttcaatgaacacatcgaaccggttttaaagaaaatgctgaacgagtatgtcgccttaagctgggctgacgtggaaaagaatctttatctttcacttaaaaagtccggactttctgacagccaggctaaaaacctcgctcaattgacaactttagcaatgaaagcattttaaaatcattcataaatgatcgtcaggaaaatacgtatgaagtaatgcaaagtgctgttagattcactctaatagcactttttcattggagatgtcacatgactgtcttttttactgttctgctcactttcttatgctgccttgtgatttcatctcttatttttatgattctattaaaaaaagagatcgtggatacaccgcccaaccgcttagctcatgcagcattcatcgtacttattggattctccctgttcttggctataactgtacccagcctagttatgtattttgcagctataactgtaaatcattttttcggagaatatatcatctatggttcactttcagacttatacatattttctgtcgtcgtaagtatcttagctttagtttatatgcttatccttacggcaattgtaaaaggaatgactcatgttttgacattgcctgcttggtcagcatatatccttgaattcatttttgcatgggctgctgtttacttctcaatccaatacgtttccaatcatatcattgagaacatatctatatttcaaggtggagaaattcttctttcattgttcatcactttcttattttcgggattggatatccttttcactaatttggataagatcacaaaagagaaattaggctaagggggtaacaaatatgagaataatgacatatatatcctatttttctatttctttagttttgcaggtggtatggctgctattaataaaaagaacctctaatatatttctgatagatatgattacggtgtccttcttattcaccctctttatgttcatcttagatcaaatgttcaaaaaaaagcggacaaattagggattgttttttaataatcctcgggcttctctctcgttttgaaatgattccggatcacacgagctccagcactgtatcaagccaaatatatgactttgcgagctcagcggccgcaggcgcgagcgcattgtaaatgacgctgccttctcttgtatcaatatccgcagaaatacgggacagcatacgatccataatctcctcaaacgtttgatcttcaaacatcctcgccaagcatctcctcgatctccacagtgccctcgtctgtctctacgataaaagaaactatgaacctattacctgatttatcaatctcaaaatcagtgactgaagaaattcgatcatcataaattaaagcttcttcgatcagtctcgggatctccatttttttatatgcgtctgttgtctcgttgtcagaaaaaacctcttgaagctcatttccaatgtcatgactgaaaatagaataggaataccgctctgtatacagggccatataaacaaattgcttaattcctcaagccctgcgatcagctcgttagtaattcgcccattttcaaagtcaattctatatgtgcgcgatgtctctattacttcactgtcatcttcaatatcatcaaattcaatttctggggaaaggttcaagaaaaaatcactcctataacgtcctccatttattgattgaatgaaccataataaaaaccgctctaaagagcggttttaaaatataagaagtaatcattctaagaagaaatcgaaagggatttatttactgctttttgagcatggattaaagtcgtatcaaataatggcacctctgaatcctctacctttactaatagtccaatttcagtgcatccaagaatgattccttctgctcctctatccaccaaattatttatgatcttcttataaatgtttttggaagactgtttaatttcacccagacacagttcttgataaataatattatttatcaattctctttcatcatcatcaggaacaatgacattaatatcatgagacgcaatacgtgatttataaaaatcttgttccatcgtatatttagtacctagcaatcctactgagcgaatgtcttgtctaataatttgttctgcagttgcatcggcaatatgcaaaataggtatagtgatcatttcttggatatatccaagaactttatgcatagtatttgtacatattacaataaaatctgcacctgctttttctaatgatcttgcaacttgacctaaagcttcacctgctttatcccaagctcctatggattgataatgttcaatttccttaaaatcaacactgtataaaaggcattttgccgagtgaagccctcctaacttcttttttatttcttcattgataattcgataatactcagctgaagattcccaactcattccgccaataagaccaatagttttcataacccacctcggataaaattttcaaaatattatagttattttaaggcatagattaggcctttacaattatttattttttcaggattactatcattaaattttatcgagaataaaaaatgattgcccgccttttaaggagacaaccatcacacgttcaccagtattcaacgcttcttcttcaccgacccgcagacgctttggaacaataatcaaatcagagggtattattaatttgtctttttcattaaaccttatttcaataggtgaaacggaaaccacttcagccggcataatatccaccggcgactcagagccaacagcaccgacagccagatgtttaattgcttcgcttaacctcatgatgaagccccgtccggaattgtgtttttctcaaccacatcaattgtcatcgtgtggagctgcctttgaattcgtgcttgtcggaatcaatccaatatgttttctttacgcccacttccggaatagaaatatacaccggaagcccgctctgcaaatcaggaataccaattgcttgaatactctttaattcctttttcacaccttctttctgtgattggagtacgttcgctcgctgctgaagctgcgcctgattaatattatccgagacagtttccacatactgcagaaccccgtatttattaattcctgaattatcttttgcagtggcagtgtacgtcttattgtctttctggcgccggagtttgaccttcgtagctgtctcattaattgaggtgctatactgaaatcctgtgatgtttacgcccgtctctaatacccaaacttccgacgggtcaggccaagccctgagacaaagcttaccctttgaagcatataactgataattatgaccggtctgttttttttgtttgcttcaatgcctttaatatcatgtcataaaggcttgtatcatctttaaagaccaatgatttaatagtataggctgtttttgcaatggacccggcaggaatctgaaaatctcgggccaaccgttttactatttgatcagggggatcagggattttttgttaaaaacttttgaacatgaaattcaaaaaaataaacagcacgattatcgtcacaacaataaaggcttctcttgtgaagtttttatcatcttctttttgctgtttctttctcttaatctcttctctatattttctttgaacctctttctttttttcatccattatctaaactcctctgagtcctttttctttttatcacttgcacccctcctttcagttattgcaattttatcgtgcaacacataagtacaccagtgaaaaaagccttgactataaagccttctcgcacagctgagactctaaaagttgaatttaatttaacggattaaaaaacagcccgatactttcggattgaatgaaaattgtttgactgcttgcattctgtttcctccttaaagtaatagagcgggcgttaaatacatatcctcatgctgaatgccggaagcggcggctcgtcgccgatgacggcgtcgatgacgaccggctcatttgagttaagcgcttcatgagaatgattccgccttcttattttttcttaaacaacaaaccgattcaaaaccaatataaaatatttaattattcagaatattttcgtaagttttgtataacaaaaatttaaaaagagtgaggagggaaacatatgataatcagaagcgcagaacactatgatgtaaaacaattgaccgatttaatgtatttatatatcgtggatttttataaaagacctaagccaccgattgaaaagatacataatttgattgaaatgttatttgagaagaacaggggtattcaattcgttgctgaacaagatgggaaacttattggctttgcaacattatattttagttttacgacgaaagcagataaaatcgtgatagaaaaagcaagaggtacaggagcagccaaagaactgtttaaaagatgcgaaacatttacaaaagaaaacgggtatgcgcatatgtcgtggataactgcatccgataattaccgtgcacaaaaattctatgaaaagatgggtggctctcttggaacttggctgacctattccatttaacccgggatgaccttattgaagaaaagcctaaaataaaaagcaggacttttactatggattatctgggtaaataactaaaaaataaacaggcatgctgcctgtttatttttattttttaaaacagccgttttaagcttttcttgagtgacggcatttcgattttttggttttcaaagaagtttttcagcatgtatttgctgaagcccttcgcttggccgtaagtgatttttcccggaagcggcggctcgtcgccgatgacggcgtcgatgacgaccggctcatttgagttgagcgcttcatgaaaagcgggagccaattcctcgtgtttcgtcactttgatcccttttgccccgcagctttctgcaaaagcggcgtaatccatattttgcagctgggtgacgtagtcaatgttgcctttgacccgctgttcatattcaatcatgcctaaattttcgttgtttaatatgacaaccgtaatcggcagtttatatttaacagctgtcggcagatcctgcatcaccattgaaaatccgccgtctccgcaaatggcgatggactgccgctcaggttcggcaaggcttgcggcaatcgctcccggaagcccgcatcccatcgtggcgagccagcttgagacgataaagtcctgcttcttcattttaaaatggcgggccatccacaccgtaaccgttccgacatccactgacaggacggcgtcttctgtggccgcatcctgaagccgggcaatgacctgctgcggcttgagcggatgagtcgcttcggtttcatccttttcgatttccttccaccaatgcttcatgtgctcggtgcaggcgtccaaaaatcttctgtcttctttatattcaatgtattccgtcagctctttcagccccagagccgcatcactgacgattcccgcattgacgggatagcgcttgccgattttcgccggatccgaatcaagctgaatggcgggcgtatcatccgggagataatccctgtatgggaacgatgtgccgagcatgatcagcagatcgcattcctccattgcttcgtaggcgggctttgtgccgatttgcccgagattcccgagaaagtggggatggctgtcaggcacgacgccttttgccggaagggtaatgacaatcggagcggccgctttatcggcgaatgcgagcagctcctcttttgctgattttaacccttggccggcgagaatgaccggtttttttgcgttgttaatatattgcgcgcatgtcacgagatgttcttttttcggctctatatcagctttgaggtatatcggcgatgtgtaaaccggctcccgtttgattttttgcgcgaataaatcatcagaaacagttaaaacggcaacgccttttttgctgtaagccgtgcggatcgcctgattcagaagatcgggcagcgcttctgccgtatgtacttgctggttgaataccgccacgtcctcaaacatttgctctaatttgatttcctgaaagctgtcacggccgatttcatcggaagccacctgtcccgcaatcgccagcaccggaacgccgtccgctttggcgtcgtataaaccgttcagcagatgaacggcccccggtcctgcgattgaaaggcagacaccgatctggccggtcagttttgcctcagccgcggctgccagggctgcgacttcttcgtgccgggtttggatgaatgtcaggttattccgttcatgtctcagttcttcgataaattcattaatgctgtctccgggaatgccgtatatatgaccgactccccattgttcaagcagctccgtcattacgtgtcctgctgttttacttggcatactgcatcctccttttacctgtattcatcccctttttcatacaggttgaaacacgagctatactctcagcttttttcttagcagatcaaggatggataacagatttcggtctttaaggactgccttttgatttgccgccccattgagtccgtcttttatttgccgttttctgttcggcaccatgaacagcggcagccggtttggggaaaaccagcgtaaagcggcggtttccggcccgttcatcagcggagttcccccattaatggctccgatgaatacatgttgtgtatcttcaaatgccggcctttcatactcaccggctttttgcaggatggtcacgttataaccggtttcttcgaaggcctctctgacggctgcggcttcagatgtttcaccttcttcaatcctgcccccgggcaaatcccataagggaatgtcttttcgttttacgagcaatatgtcccgcccgtcattttgtatgatgacaaaagcgccttgtgccatgtcgtcctcctttacaaaaaagaccgcggcattttagcctgcggtctttgccgttactttttaaaatgatacggcagggtggcgacgatgatgtccttcttccaaaacagccggacgcggagcaagaaggctgattggttgtgaaggatggtctgccagcgttttttcgtaataaattgcggaaacagcaccatcacggagaactgttcttttttcgctttctgttcgaccgtttccaaaaatttatcaaacgggtgaaccagactgcggtatgaggaatgcagggtgacgaggcggacaccgttatgaagctcttcccagcgcttttccacctttttttcgttttctctgtcaaaggaaacatgaaccgcaatgacctgatccgataatgatttcgcatactgaatcgatttttggacgacggtggtgacaccggcgacaggcacgatgacgacggttcccctgatttcctcaggctgctgatcaacgacccgcagctgttcgccgaccgcggtgtagtgatttttaatgacgaaaaacagcatgacgacagcaggcatgaataacagcactggccagacaagattgaacttcgtcgcgaataaaatacacagcaccataaatgaaatggcggcgccgcatgagttgatcagcatttttaccgcccagcccttcggcttctgcctgatccacttgatgcacattcccgtctgcgacagcgtaaacggaatgaacacgccgacggcataaagcggaattaaatgttccgtgcggccgccgaataaaagaatgagcaggatggacgcgataccgagaaagatgatgccgtttgaaaagcctaaccggtcgcctcggaccgtaaacattctcggcatatactgatcgcgcgctaaattaaacgccagctgcggaaatgcggaaaagcccgtattcgccgcaagcacgagaatcaatgatgtaacgccttgaatgaaataatacaccgtatgccgtccgaaggtttccgcggcgatttgtgaaataacggtctcgttaggcttcggacccgtgccgtagccgtacgccagcaccgtaattcccgtaaataagatcgccagcagaatgcccatcatggccaaagtgcgggccgcgttttttgccggaggatttttaaaggccgggatcgcgtttgaaatggcttcaacaccggtcagcgccgaacaccctgaagaaaaggccttcagcagcaaaaacagcgtgatgcccgccacgggcgtgccgattggtgtatgctcggccggatgaacctggcccgtcatgagcttaaacagcccgacgacgatcaaaaggacaagcgccgccacaaacagatagacgggatacgccaaaatggacgccgattctgacagccctctcaaatttaaaatcataatcagaatcacaagcaaaacagcaatgagcaaatgatacgggtgcagggccggaaatgccgatgtaatcgcgtcagttccggcagaaatgcttaccgccaccgtcagaatataatcaacaagcaatgagccgcccgcaatcaggccgggcttctcaccaagattctctttagaaaccatataagcgcctccgccttgcggataagcgtaaataatctgtctgtaggacagaatcaaagcaagcagcaaaatgagaacaccggctgcgatcggaatggaataccaaaacgcggccgcgcttaccgcagccaaaatgatcagaatctgttccgttccgtaagcaactgatgacagcgcgtctgaagaaagcatggcgagcgccttgagtttcgtgagtttttgctctccggccgcctgtgatttcagcggtttcccaatcaaaaatcttttgattgaatggtacatttgttgtcttcccctttttttcattttccgtttgatttacaaacccttactgctatgatgtctccgaatgctgattgcatgccatatttcagcacagcaaaaagacacagaggcaaacggatgcccctgcgccataatcgtgcacaggtttcattcatctcctctcatgaacgcttacgaggttagctgtcggattcgggctgatgagagttggccctacctgaaaaaggattcaccccaagcggcattacgcgccgcaaattggttcccccgctctgattacagattaagcgatatagattataaaagagatcatactcccgtcccgttcagttgtaaaggggcttttatgctgtttcaaaaataaaaaaatcaccgccaaaaatggaaataaaaatacaaaaaaagaggcctgtgaacggcctctttttccttcattactcttcgcttttttcatgatccgcttttctttttttccttcttgccgtcagccagatcagaccggccgcaatgatcataagtgccgcgaaaacagcaatatacgtaacgttcagtgctgcggacgggctcttcgtatcagccgccggactgctgtcatcggacttgatttgctgatgattcgaaaacagctgccggccggctgtttcgttaatgacggttgcggcatcgcttgtgctgtctaaaaagctgatcagctcttttgtgacagacgcgccgcttcctgataacggagcaaaaacagcgatgctccggccggagtcccaaggtgattcctgggtaaacgcgacttgtttcgtcgtctcattcagcatctgaaacgaagaaacatcgtacgcgccgctgcggtctgacggcacgagaagcttagaggcgtttgactttaaaagcgggatttgcggcaggcctccgataaacacaacattccggcctttggcatccgcttccttcatgtctgatgccgtctttacggtaaagccgtttccgaatgaatccgccaccagagaaagctctttcagtgtctgcatgtttacgtcatccgggatgacgatcactgttttctctttcccgccgcccgcaaacgggagcggccattgcccgaaatcagctttctgcgccgcatcgcttaccggatacgtcagcgtgctgcttttatcaatatagacccatttgttttcgtcacggtcgatacacggattgttatgtttcaaacctgatgtgacaaattgcagatcaatgtacctgctgcttcgcaaaagcttcggatcaatcgggatggagacgtggtaaaagccgtctttatctttattgccgagatcatcaagacgcaccgcattcggctgtccgttgaccgtgacgttcagctccgctctctcggcgtcatttgctgaatccgccttcgtccggatcgattccgacgtctttaatgtaagtgaaagcttgaccttaccgtctttatcaacagcggccgccgcagggtaaaagaagtgctctgacgccgttttgtttgatccgaccgttacatttcccgcgccgaagtcctctagtgtcagtttattgcctgtcttttccgcagcgggctgaaggcggccgattgtcaaagtatctccgcccagctggcttgaataagcgctgtctgtgatgacgcggattttatccgccagcgttttgtctgattgcgccgtgacaaacaggacgggctgacgtttgttccctgatgtcagaacccgttcagcgagaagaagtttgttgtcttccgctttgatgttcccccgttcgaaaagctcgtttattttcccgttccaatgctgatcagcgccgatgacaattgacggattgctgattttgccggcgtcggattcttttacataggataccttcagcctgctgtctgccgttttcagaaatgcttctgttttgactgcggcttcagcttccgccgaggtcggtttgtcaggaaggataatatcggtttcttcacccgtattgcctgattgggcaaacggatacgggaaatggccgagatccgctccctttgacttgcttgcttctgaaagcacaaggcggctgtccggataaatttttatccagttgcctgacgtatcctgcctgacgcagacgccctcttttaatacgccgtaaaatcgtaatgatacattgtgaaagccttgggcggattggcttttgctgagattgagcttcaccgttttccgcttggaactgccgtcaagcttaatggatttgacgggttcatcatcaatggcgatggttaaagaagacggggcaattaataagtttgacgcctcgtaatcaatcagaagcgactgatcggcattcgaagctcccgcaggaatctgataggtcagctctgcgctgtctttcgccccgtacagtgtcatcagatcgccagtcagcgcctgctgctcttttgcgccggcgcttgttccgagggcggaaccgtccgttttcagttcccgggccgcggccgcctgcccgttagacatcaatagcaaaaggccagttatcaatatgatcgcttttttcaaaaaggtcacccgcttttattttgattgtatcgctccgttttgtaccacttgacttcctgcttgaacaagcggtgcttgatctctgtgaataatgaccagatgacgagcacgatccaagcctgggagtatgtaaagtacatcagaaatacgataaagaagttttgtttgttcatttctgttttttcaatgcttaaagtaatcatgacctcagtcataaacaggaaaaaggccagtatccacaaaatcatcgccaaaaacccgactgccagatgcaggtcgtaaaaaagattgatgataaaaatcgtgtttgacatgatcacaccgaagaaaaacaaaaaatacgtaaaaaagaaataaaacagatcgaagatgatccgcttgcgtttcagcttaaaaaattgggataaaaacttgagaacaacgtattggttgccgcgcgcccatcttgtccgctgacgccaccacaccttccatgtctcaggctcctgctcccatgtcacagccgccgggaaaaagcggatatgatagccgagattatacacgcggatggtcagctcggtatcctccgccagcgccttatcatcccagccgccgagctgttcgataatgctccgcctgatcgcgaagttcgttcccgggatggtggcgattttgaaccatttccatctgccgccctgcgccatccactgaaagcagatggtttcaatattgataaacttcgtcaggatcgttttggccgcgttgatgacacggaatttcccgacaaccgctcccgctttctcatcattcatcagaccgagaaccaggtagtacaccgccattttttccggcgtgttgtccgcatcatacacgcagatcacgtctccgttcgattccgcgaaccctgagttcagcgccgaagattttccttttccggcgttcgggggctttgtaatgaccattttaatgaagtcatactgacgggaaaattcattgacgatgtctcccgtccggtcggaggagttatcattaacgacgatgatctcaagcctgtctttcggataatacagattcaccatcgccttcagcgtctgcctgatgacgacctcttcgttatgcgcgggaatgagcacgctgaccttcgggagctcccccatctttgcgcgccatttcggaatgttccgttcgaaggtcatataatgcctgaatccgccctgcatcagaaacatgtgatagagaagcatcacccatattaaacttaatgagataaaaaacagaatgttactcaaggctccttctctccttaaaaattcgtttttttaatgtggcgcgcaaataaaggacgtagcaggcgaacatgatgataaacaataacaccacgccggagagaatccaaagcgctttttccagaggcgtctgctgatggtgattgaaaaaggccgttatcggatgaatcttgttttccacatgaatggtcccgtctccgtccgttttgatcttgacgctgtccgacgttaccgtttgcttcgttttcttcagatcgagccactcgccgccgggaatccgctccatctgattgacgagctcggggaggtatttcatgccgagatacggatggtagaaaccgcccgccgttccgccgccgaaatcaatcatctgcgaaatatgattctccatatctccgagcggattttcctttgagttatcggcataaccgattgtttcagggtacagcgtcatcccgtccagcatagccggctttgagacgaacggaggggcgcccgaggttttccacgtcgtgccgctgagctgtacttgtccgaaaatgctggagaaataagaagatgcgattttgtagccttcttcagacatcgtatagtgcggcgcttcgaatgacagcgggtaaaggccgagctctgtcagatcgtcaatcgcctgctccagcttcgttctcgtgtagattttttctttttcacggaaaggcttcacatacgcccggtacgctttttcattcggaaaatcctgttccttttcaagcttgaccggagtatcatccgcattttctgacgtaatcggctgatccgctttggcatcccaaaattcaaagccttctcccgtttcgctgtatcggtatgcgtgcgtgtagccgtgaataatgatgctgccgcccatttgctgaagttttttcaggacgctgaccattttcggtttgtccgccaagtatactttttctccgttttccggattgagatagaccggaatgaccgccagaataaacggaatgtgtcttttatgcaggtaagcgcccgcttcgtaaagcaatgtttcatctgacatcggactgatgtcttcaagccgtaaataaaggagggtgccgccctctgattctccgaatgcgttgcgcagcgctttcgccgtcagaaacgaatcatttaacaggctcgtcacaccgaaataatagtcagagcgcgccgttttccacataaaagggcgggtgctgccgtcaccggaccggtatgtataaagggactttccttttactcccgatacgccgagcacggacatccctttttcaagcggcatgtctgttttttcttctttgccgtaaatgcggtataccgtttctttctctgtcagggacaaacccgcaaattggcggaactgtccggcgttatagccgatgctgataagctgctgcggcatactgctgatcagagacacaaatgatgtgctgagcttttttttcgtgacgccgtaatagatgacgcgccgattctttttgaggtccgcggctgtgatgtctccgtcgcttttcacggtgacggcggatgagaaatggcccgcggtcagatcaagcattttgacctcagcggtttctttgccgtccgtgcttgtataaataatgagaatgccgtcctttttgtcttttgcttccgccgtaaggggaacataaaccgccgaaatcatgaagagcgccgagagtaagagacgtatccatttagagttcattcatcatcatctcgttttccagttcatttaaaaattgctcagccgtttgtaaattctttcggtacgccaagtaacatacacggaaggtgatggagacgtatttaccgttttgcagccggtacgtatccaattcctttttcagcttcgccagaacggccggcatgttttcttcaggcgtatgggtcagcacgatgccgaaccgttcggcggacggcctgaattttttgtctgtttcccgaacgcttgaccggatttggcggctgataaatgccagcaggcggtcggtctctttttctccgtagagggatttgaattccttgaaataatgcatgtgcagcagcaaaaagacgaaggaattgccgtagcgttccgcccgcttgatctcctcggaaagctccagcttcatccgcagatggttgtcaaagccggtcaccctgtcgacggcgacaaagctcgtaatctcttcacgcagctgtttcactgagcgctcaagccccttcgccaactcgtgaatccttcccgctatgtaagaaaagacgagcagcgcaatcccccaaatgaccagcacctgcagactttcggcaccggcagacgccataaagctcccggtctgaaaccacaggagcaggctgccgagaacaaataagacgagtaaggtgatgacgagcgcgtagattgccccgaaccatatgccggctcccgtgacaagcaatgtgatgcaggttatcagaagccctgcggattgctgagacgcatagtaaataaaaaaagacagcagcaccagcataactgctgtgtagctgaacagtttttgtgattcattgaatgatattttcattaaacaatttcctttcagccagaagcggcagcaggttatcgaaagaatgtgtatcgcccccgctcatatagccgccgtaatcaggtttcagcgtgtccagtgtttcaaatgaagtcattctttcataaagcggcttgatgacagccggatcagctttttgttctgctaaaaaaagaacggccagggcgtaaacggacggtgattcgtattgaaccgccggctccttcgtgtctgcgctgtatcgtccgtacagctgtccgcgcgacttaaattcctttataatccatttcgacagcacagcggctttgccatcgccccgcttcagattcacggcggcatacagctggtcgataacattgacttcgctgtcatatttgtattccttagtttcggtattgaacgatttcggcagaaaaccatttttcaggggcgcaagattgagaacatcgaggttccggttttccgttttctcatcgataatccccttttctctgagcatctgtaaggcgccggggtcgacataggacaacgtcacggtctttgacgcggcatttgaagcggcatcataataatccgtaaaatacccgtcattcgtattgtatttttccagcgccttcccgatctgcaccgctgttttcccgtattcactgtttccccatagggttccggcctcattcagacagttcatgattctgaaatcgtcaattaaggcattggtgccgctcgctttattcccgtcaatcttccacgacacgagctcgtttttcgtcagaaacgaatcggtgagaagctgatattgcgcttgaaactgccgttcatctttcctgttcagcaaaaatgccatccatagtccgagagactctgataaatattccggctcaccggttatgttcgtccggatcatcccccgcccgttcatcaatttatgataaataaaatgctctgcgggctgaagcggcccggacggttcggctgccgcctgtttttcagtgccggcctccgcgcaccccgccgtcagaacgatcgaaatcaaaaggatcatcagacgaaaaacgaattgcttcacagtccatcctcctattttataaatccttttttagacccatatcttattttttcacaaagtatttttactatataggaaacgataaaagaatactagcattttttcacattgggaaattttaaatgggagcgccgtctgctcaccttttccctcttcgtctggatcgtattcccattacagttaaaacacaacaaaaggcagcatttctttacaaatgctgcctttctctgatctatttatccaggccgagttttttcagctgttctgccagcgcgttgttcatcggctcctctttgttttggcttttcatataagagttgatgtcccgcttggatgcgcgtccggatttatctttcgccttgcgcttttcaaagacggacagtttctcccggtggccgcatacacatgcgaaggtttggccttcgccctggccgcgaagctccattttcttatgacagttcggacagcgggcgtttgtttttcttgccagcgttttccggctgccgcactcacgatcctgacatacgagcatcgtgccgcgtttgccgttgactttaagcatcattttgccgcaatcagggcaggcggtgcctgaaatgttgtcatgtctgaaagtctggctgctgtttttgatttccttcaccgttttgcccgcatatgttttcatgtctttaatgaagacggcggatttcagtttgcccgctgcgatggcggagagcttttgctcccactcagcggttaaggccggtgattttaaatcttccgggacgagctgtaagagctgcttcccttttgacgtaatgaaaatatctttttcttttttctcgatcaagaaactgttgaacagtttttcaatgatatcagcgcgggtggcgactgttccgagtccgccggtttcacccaatgttttcacaaggttcttctcttctccctgcataaaggcgcttgggttctccatcgcggataacagcgtgccttcattaaagcgcgccggcggtttcgtctgtccgctcgtttctttcagtgatgagacagtgaggcgctgaccctgctgaagatccgggagggtctggtctttgtcttcctcatgatcgtcgtcatcctcgtacatatcatacacggctttccagccaggcgattgaaccgttttcccttttgcggtaaatgtttcgccgccgatatcggctgtgacctttgtttcttcgtattcgaacgccggcattaacacggcgagaaaacgtttggcaatcagatcgtaaagctttcgttctttgtcgctgaggcttgaaaggatcagcggctcctctgtcggaatgatggcatggtgatccgatactttcgcatcattgacgaatcctttatgcgctttgacgccccgcttcagtatttgattgacgtactgtgcgtacggcttaacttccatgccgtttaaacggtcttttaaagtcggcacgatgtctgcggaaaggaatctggaatccgtccgcgggtaagtgacaagcttatgctgttcatacagcttttgaagcacggacagcgtctcttttgcggaaaaaccgaagcgcttatgagcgtcccgctgcaattccgtcaagtcgtaaagaccgggagcgaagcttttcttcgccgtttttttcaattctgaaatgaccgccggctttccttgcaggtcttttgccaaacggccggtcaccgtctgatcgaatgttcttgtctgctttgtttttttatcctgccatgtcagcgtcatctgatcagccgccgcacggagaccgtaataaggaacgggtttgaacgcctgaatgtccgcttcacgcttggcgatcatcgccagtgtcggagtctggacgcgtccgcatgacagctgtgcgttaaatttcgtcgtcagggcgcgggtcgcgttgatgccgacgatccaatccgcttccgctctggcaacggcggaatgatacaggttttcgtactctttgccgctgcggagcttttgaaatccttctttaatcgccttatccgtcacagaggaaatccacagccgcttaatcggtttgcggacgtttgccttttcgataatccagcgggccacaagctccccttcccgtcctgcgtctgtagcgattacgatctgggtgacgtcttttcggacaagctgagctttgaccgcattgaactgttttcctgtttttttaatgacgacgagcttcaaaggctccggaataatcggcagatcctcaagccgccatgattgaaattctttgccgtatccttcagggtcagcgagcgttaccagatgcccgagcgcccatgtgacgatgtagcggtcgccttcaagatatccgtttccttttttatgacacttcagaacgcgggccaagtcccggccgactgaaggtttttcagctaatacaactgtttttgacatgcttttcacttctctttctttcacaatcatcctgttattataacagacttcctcacgctctctctaatcgaggacgttttttgtgtcaatttctgagaaaatgacgtgggtcacggtttgggcatacggagaggtgcggttgatgaagtgttcgatcgtttccaggctgtccgcgttcatcttcagcatataacacgccgccccggcgacccgaaaacaaaattcaatgttgggaatggattgaatgtaggttttaaattgatcgtattttccgtttttcactgtcgcttcgacaatgcaggaaacaggaagcccgatctttttttgatcaatgtccaatgtatagcgcttaatgacgccgaaggattcaagctgtctgacacgctctgtgacggacggagctgacaatttgatttttctgcccagttcccgcatggacaggcggctgtcccgctgcagctctttaatgatgctcagatccacattatctagtttcatgactgtagtccttccttacccttttggctatattatcaagagaaatccgaaaaatgacaagaacaactggctgaaatcatgcaggttttttcaggaactgacgcgaaatggtcatattaggactgccctttgcttatagtatagaggaaaaaagatgtccgacaggagggagctgtatgttacacacgcctatcggcagacttcgcacgatggggtttattgaaggaatgtcgcttttggtgctgctgtttatcgcgatgccgctgaagtattgggctcatcatccgctcgccgtcaccattgccggttccattcacggcggtttgtttatcatttatctggcggtgctggcgtatgcggcgtttactgtcaaatggcatgtgaaatggtcagccgccggttttatcgcggcctttattccgttcggtaattttatttatgatcgcggcctgagaaattatcaataaaaaagctcctcttctgcagaggagcttttttcatgcgttacatccatttcgtcacccaggcgatataataagcgccggggatgaatacgagctgggcgagaagcgtaccagcgacccttgatgtgaccatcgtcaatgatgtccattttaaggagacgtagctgcgcttgcccttcgccacatcgtctgccagtacggagactttcgggtcaacaaacacagccaacagcatagtcgcaactccgttgattaagcctgatgccatcacggcggtcgtgctgtgctcaggcgccagaaggccggcgtacagagcggacagaacaccgatcgtgtaaatagacgtaatgaccatattaatgacaaacaagcgtttcggaatcattcggaattgaagcccttttaaataggagactgacggcagtctgatataagaacgcgcatgcttcagcccgttcagtgaaaatccttttttaaatacctgcatgacggagcctcctccgtccgccaagtgtataatcgccctggagaataacgcgacgaatgtcggcaaaagacagatgccgagcatcgttccgaccgtggagccgaatattaaaaatcgaaactgggcgcccacaagagacagggcgtttgatccggcggcatcaatcagatgtccggtaaacggctgctgaaccatgtttgacatgcgcgacacgatgaccatgacattaaataatgacagcgcggacgcgataaaaccgactctcgcgccggaaagccgtgttgcataggcaagcgtttcaatcgaatgtatcagcaacagaaaacagaagataaacagtacttgtgaagtaataacgtgcaatgtatgattcctccaaatcttttctactgattagactctgcagactgcggcgaggtttcggccgtttacataaaaaaaccgcccggatgtccggcgcggttttgtcttattcttttcttacgcaaataaataatatatggttgcccgccttagcccgcgggtgattcgtattaacagttccgacagaatcattcttcgaaagtaaacaccatggaagttcttgaacacaagacaacgaaagccctacctctcaatcgtcactgcggctccgaagccgcgccggtgtgaattgtaaaacaaaaagtcttttttccatctcttcgttaggggcgaatgtcagaaggaaaagaataagctcagctttttttcaagctgtccgttgaagcctgaagcttctatatcaaaacagaaaaaagaagtttactttcttttttatttgcatgttgtcacttagcaattaagtataacagattgcccctgaataatcaaatgatttattaaagttccagctcggccggcgttttttcacccgcgttcatgagcttgatctgcttcggttcaatttcaagaatcaccaggttcggatcgtcttttccgtcaaaccagcgttccagtttcggatcccacagcttttcttttaaatcggctgagttgttcagtttggcggttccggccacttccacataagcgtctccgaatccttcacagtcataccctaacagaatatgaacattcggattgttttcaatttcttccgctttatgagtgtctttgctcgtcggcgtgtaaatcgttaagccgtcatggaaaaatgtcatgtagcgtgaatgcggtttgccttgctctaccgtcgcaagcgaaccgactttatgatgatccagtacttcaagcactttttctttgatttcattttgattcatgaagaatcactcctttttaacgtctccgcttttacttttccacattggggagacatttaaaccaagaaatgtgctcttctgccgatcttcgctccattcccgcttcagcatgctgtagttcaccgtgtcatgataggcgccctgtacgaaaatgccttctctcgtcagtccttctttctgaaacccgagccgctccgccaccgccctgcttttcgtgtttttttcagccgcgctgatcataatgcggttcagcccgagatcctgaaatgcatgggtgatgaccgcccggcagcttgcggtgataatgccgaatccttcatgctctcgatccagccagtagccgatctctgctttttgattgactggatcgacattatggatgctgatcatgccgcaaaaccggcccttcacaaaaattccggcgtcaaacccattctcttccgcgtatttatagcgccattcggggatgatcacatcgcggtacgtatcgatatcagccagttcttccgcccagctgagccattcgctgagatggttttgatttcgcttcataacagaatacaattcgtccgtatcttctttggcaagcaatctgatcgtcagatgttcccggatttgacaggaaaacacgatcacaccttctttcctttattagccattatacaggtaaattcatttttttccatacaaaaaaagatgaggcgtgcagcctcatccttaaatgcgcgggtcggtgaaaacatcgtgatcatccgtgcttgtcgatgacatttccgtgacgaccgccccttcttctcccgcttgaaaccaatgcttcgtatccggcggaatggtgtattgtccgcccggctcaagcacaatctcatgccagacggtgtagtattccttgtcttcttccggcgggaggacgcttgggttctctgtcttttcgccttccacgtagagatacaccttcccccagcggcagcggaatgtctcttgttttcccttctcgccgccgaccggcggatggcggtgttccggacacgtctgccgcgggaagagcaccaattctttcgaacagtagcggtcggtattcacgtaaataaacagctgaagcccggtttcctcaagcttgcctaagccgtaatccatgatttgaatgtcttcgacttcattatcagtcagaacgattcccgctttttgatagtatgcattcacatcatgtttcgatatcgtcatgcttcagcccccttatgtggttacaaatttgccgccgttgacatgcagcgtctgtccagtcatataagatgattcgtctgaggccaagagcacatagcagccgacatgttcaacaggctggcctgcccggcccatcggcgtagtctgaccgaaggaagcgactgtttcttctgagaatgtcgccggaataagcggtgtccagatcggccccggcgccacggcgttgacacggataccgtcgttgacgagcgcttgcgccatggatctcgtaaaaccgttaatcgcgcctttcgtagccgtgtagtcaatcagctgcggattgcctgtgtaaggattaatggatgtcgtattgatgatcgcgctgcccggcttcatgtaatcaatcgcttttttagtcaaataaaattgtgagtaaaagtttgttttaaaagttctgtgaagctgctcgcttgtgatgtctttaatgctttctttcggatgctgttccgcggcgttattcacgagaatatcaagacgcccgaattcttcaaccgttttttcaaccgcttcattgcaaaagtcttcctcaccgacatcgccggggattaacagacattttacgccttcttcttccactcgtttttttgtatcttccgcatcaccgtgttcatcaaaatagacgatcgcgacatttgcgccttccttcgcgtaagcaaccgctacggcgcgtccgataccgctgtcgccccctgtgataagtgcggttttcccttttaatttatcagcgcctttatattctttgtattcataaacaggcgtcggattcatttcgttctcaatgcccggctggcggttttgtgattccgctgggaattcctttggatagttttccatgtcaagttcctccttcttgttcgatctcatatttcttgtctacctcggcagttctccggataaacatgattgagacagttcaaaacgttttcggagaaaaatgtttcacatggaacgcaagaaaaaaacccggctggcagccgggtttttgttttcaattatgaacgtaccgcttgtttgcggagcacgtcttttctcacttttccaaggttgtttttcggaagttcgctgacgaactcaatttccggaattttaaaggcggcaagatgttcttgaaggaatcgggtcacttcttcttctgtcaggtcttctctgccgtttgtcacgatgaacgctttcggcttttcaccgtaaagcggatcagggataccgacaaccgccgtttcgagaatgcccggcacttgctgaatgacctcttcaatctggtcgggataaatattgtcgccgccgtagatgatgacatctttataacgtccggtgataaagataaatccgtcttcatccacatatccggaatcgccggtatggaaccagccgtctttcagcacttttcgtgttgcttcttcgttaccttcgtagcctttgaataaaaacggacttgtcacaacgacttctccgattgagccttgaggaaggacttcacctgtttccggatctacaacgcggacatccacttcttccatcggtttacccgcggaagcggctttatccattcccatttgcggattccaagagctgataccccacgcttccgtgcttccgtatccgtgcatgagcggaatgccgatgtcgagatactgctggatcaggctgcttggcacctttgtgcctcccgtcatcatataaacgatagaagacatgtcagtctggtgcgtttcccatgctttcagcaggtatgtgaaatagactggcagcgccatgatggtttgaattttttctttttcgatgagcttcaggttttccacagggtcctgattgtctgtcataatgaatgtcgttccgctcatcgtgccgaccatctggcagataatcgcgctcgtatggtaattcggatggcatgctaagaagcggacatgctgcattctccccgtgtatgccaatgtcgcgttgacgtagttgtatatgccgccgtgagtgatcatgcagcgtttcggattgccggttgtacctgaggtaaacatcagcaatgccgtatcgttttcagacaccgtttcgacatccggtgtctcaccggagcctgtcaataaagcgtcaaactgaggcgttgtctccgcagctgttccggtctcgaccttcagtttaagagaagataccagcgcaggaagcacttcttccataatctctttaaattcagtgctgtaaaaaacagctttcggttcacaggctgctaaaatgcctttcatttcgtaaggtgttaattgccagctgaccggcacaactaccgcgccgatttcgagtgccgcaaacatgacaatggatgccgcgtggccgtttttgcaaagcatcgccactctgtcgcctttttttattcctttatcaagaagcgcttgtgcaagctggttgattcgttttcgatattcagcgtaggtcagggtatgcgcaccgctttttacagcttcaatctcttcgctatttgaaatgtcatgcagaatcagatgctgtaatgtctccatattttcatctcccataatgataaatcacaaaaaaactctgtcagattttctttctcacgcaacccattttaaaccaaaaaatataacttgtaaaactattttgttttagaactattccatcagtgaatgatacaatagtcccgtgtttttagtttcttcccttccccttaccctcatacatgcacaaaaaaacacaccccacatgaggtgtgcgcttcctgtttaccgctgtcctttctcctgaatgaaatgataaaacagcttgtttaaacgtttgtataaatcggcctcatcctcagtctggaaggcttttatactgtcttcggactcgatgatggccgagctgaccgcacttagtatttccgacccttcagcgggcatatcagccggcgccatcatcaccaaagcgcggtcgacggtcagggaatttccgtccatgcctttgacactgcatggagctgtcaaatcataaattttgaaaaaaggcgtgacaatttcttcatttttgagatggtatagggccatcgccgttcccggaatgccgagtccgccctgtcgttcacgctcagcaaggcgctgtgcggttttttgggcattatgaaccaatccttcttgctccagcatgtcaaacatacggttcaaaaacagctcatacgccgtgtttgaatcaatggatttgaccgaaaagttccgcagcacgctttggataaccgccgcgtaatgcgccatacggccggccgcttccagcatatcaggcgtctccggctgcttctcttctcttttaccgtttctttttttgtcaagaatcagcggaatttttcttttgatgtactgcttgacctgatcagcgtcttcttcatttaaaagcggactgaccatgacgtaatcaatattttcatacgggatcggaacggtggatacgatcatgtcatacgcggtgatgtctcgatccttcagttcgatgagggaagacatatcaaaggaacggatttccggaagctcttttttcagcctggatgcgagcattttggacgacccgatgccgcttgaacagacgatcagcgctttgatcttcgcttcttcccgtttgatttccaaagcggagccgaagtgaagaacgatgaaagcgatctcattatcagagaaaagaagccccggaaagaatttttccattccttcttctacggccatgtacagcagaaagtagtcgcgtttaatttgctcggtcatcgggttgtacatgtcgatattttcttttacccggttgatcgcaggctctagatgggcgattaaaccgtcgtataaagagccattttccgtcagatcaattttaattttttcagaaatgaagccgatcagctgcttcgtttgcaaggccgtttcaacctctatgtcttccggtttgaattccgttttgtatttgcggttggcgctccgcaaatgaatggtgatatatccgatctcagcttccggaattgaaacgccgaacgctttttcaagctcttttgccatttccagcgcagagccgtactccttcgtctgttgcagcgcttttagttccgaagcctccatcgtgatggtttctccgagcctgatccggtccatcgcaaaggttaaatgaaccgcaagcgccatgtatgagctgtcagataaggcgatcgcgattttttccttgagctgaattaagagccggtccattttcaaaagttccgctttatttacgacgccgaacattttttcagcatcgtccggttttcctttaatattcaattcaaccgcttccaaaaagctttgaatatcaaggcggttgacgatgagattgccgacgattttccgtttcgcattttccggccccgtcagctgaatgccgaagcccctttttcggatcagcgtcaagccgaagggcgcaatccaagtctccagctcatccaggtcatagctgatcgtcgcgtttgtcacttgcagttcgttcgccagactgtagagcttgatcggctcttgagactctaatagtgaacatagaattaaaagtttccgctcctcagcgctgtattcatgctgttcataggacaggtctgacaggagtttttgtttgtcctccgggtttcctaccgctttcagtcctttgccgggctgtttatcaagtgccagaccgaatgattccatcatcggtttgattgttttcaactcgcggtgaacggttcttgtgctgacttgtaaagcttccgccagttcatgcactgtctcgtaccggttctgcagtaatagatgtttcattaatttttgttctctcgctgtcatatacatgaaacgcgcctccagattttctagttgtgagaagtatggcatatggggagtgctgccggggaaagtggtgtaagttataatataaaacgctttcaatgattattcaaccattttcaaatggcaatttggcactgggccgtgtgacagtattgaaaaagaaaaatgtgtcagataatatgccatgacgcttgttactcttgatccgcacggctatacttcaaagtgaccttacttgtttttagacattgcacaccacataaacaaacgcccggaagatagcttccgggcgtttgttctgtttatggaatatcgcagccttggacactggtataaatccggaaccactgatcatggctgagtttgtacgcggatgcacgcaccgcggcggaaatgcggttctcttttccgctgccgacaatcggcatgatgtctgccgggtgggtgaacagccacgcgtacatgacttcgtcaatggaagcggcgccgatttcttcctgtacggaacgaagcgcggcacggatacggacgtccttatctgattgtccggtaaagacgctcccgcccgcaagcggtgaccacgccatcggcggaatgcgtttttcctgacagaaatccagcgtgccgtcatgaatattttccagctcgtacgccgagatttcaatttggtttgtgatgagcggatcatccaaataggattcgagcattctgtactggtgcgctttaaagttcgataccccgaaatatctgacctttcccgagcttttcagcgcgtgaaacgcttcagccacagcctccgggtccataagcgggtccggtctgtgaatgagcagcacatccagataatccgtattcagattcaaaagcgactgctccgccgacgctaaaatgtgagacttcgacgtattataatgatgtgacttgtttccgggccgttccggtgattcaatgacaatcccgcattttgtgacgatttcgattcgctcccttattgaaggcgaaagggacaaagcgccgccgaacagcttttcacacgtataaccgccgtatatatcggcatggtcgaaggtggtgatgccttggctgatgcaccattcaatcagattcagcagctctccgtctgaaacattccattcgttcagacgccaaagcccgtgtatcactcttgaaaattccaggtcttcagccaattgaatgcgctgcatgtgaaatccccctttttcttagagcctcttgtatctctgttttcaggaattgcccatgctgtttcattctgcttcggcggccgattttcctttcaacccgcgaaaatcgtcatttaatgattctgaaactgctttttcgctttctcaacgacgtaatggcttccgccgcgttttttgacgtcttgaatcatcatcgcgatcaagaggtctttctttttataatcgtaaccgacaaaccagccgttttctttgccgtctttatcttctttagacgttttcagctcggctgtaccggtttttccggctacggtaatgccgcttacggccggctgatatgcagagccgcgcggatcttcaacgacgcctctcagcccttttgtgatttcttcggcattggctttcgataccacttgcttatgccagatttgcggtgttttttctccgtctttgatcaatgtcggtttgacgagatttccgtctgttacaaatgcggtatagtcagccgctaagtgcagcggagacatcagcatctgcccctggccgtagcccgtatctccgagaaggatctcggaatcaagcttgccgttagcgattgaagacttttcaatcggaaattggtacggaatctcttcatcaaagccaaatgtttttaatccttttgtaaacgcgtccgctccggcatctatggcattttgcgcaaagtagatgttgtctgatgtgatcagcgcgttttcgagatccacttcattcaggcgctctgatacgcgtgtgacatggtaaccgccccagctcgaatctttctgccactcttttccggtgatttttttcttttctgacgctttcaatgtgccgtttgtcaggccgactgccgcggcaatcggtttaatcgttgatcccggcgcataaagtttgttgaatttcgctgaaaacggattgtttttatcttcattcagctttttccactcttttccgctccagccgaaaagaaagccgttcgggtcataagacggtgcgctgacgagcgcgagtgtctctcccgtttgcggttcgagggcgactgccgctccgctgtcatctttcatagaatcatacagcttcgtctgcgttttcatgtcaatcgttacatgaatatcctgcccgctttcggctttcttttcagcaatgacctcacctgtttgcgggacgtaaattttccagccggtcgtgccgcgcagcttgtcttcatatacattctcaaggccggcgatgccgattttggaagtatcgctgtattggccgtctttcgcttttttcagctgctccgctgtgatggttttaatatagccggtcagatgggccgctttttcgccgtacggatagtagcgggagctgactttcgttttcgtcacgccgtctaatgcgagcaggcttttgaccttgctttcatcatccggtctgattttttgaagcgggacataggagtcgtcttttacccagccctggttcagtttgcttttgatatcgccttcagaaaggtccagtttttcagacagttttttgatcacgctgtctttatccttgccgagttttccagggataatgccgatttccggcacctcggtattcacggcgagaccttttccgtctttgtcgtaaatttgtccgcgcttcggttcttcatttgcgatctgcacggttttgtcatcggaaagctgtttgaaaataaaagaaggattccagtcgatgttccatgattctccatcgtctgttttttcttttttcaggacggccgtgttttcaaaagcgaccttccctgcttttgtatccatgctgactttataatcgatgtgctggaggtcatcttttttcttgtcgtcttcgtcctgtttttcggcagtgactttcagatttttgacccctgcttgttcataaacggtttcatatcgctttacaaaatcctttttggatcgttttttcttttcatcctgggtgaggctttggtacatcttatcgtaatgaccgccgttccagtcttttacgaaatctttcattctgtcttcggccgattccgttttcgagcagccgatcaaacctatgattcctgcgagtaaaagtaataggtataacccttttttcactgtctattcccctgccttccaactgttattttctcctaaaccaaatcaggctggcaaggatttttttctcatattgtttaaaatttttttgtttttcctgccgtcatgggccatattcttatacaatatatctattaaaaaaagggggaatttcagatgatcagagaagcagccatgctgtatgtaaaagaaggtcttgagggggaattcgaagaggcattccgccgggcggagccgattatcgcgggcatgaaaggttatctgtcccattccttgtccaaatgtatggaaaagacgcataaatatttgctgcttgtggaatgggagacattagaagatcatacaaaaggctttcgcggatcgccggaatatcaggaatggaaagccttactgcaccgtttttattcaccatttcccgttgtggagcattttcaggatctatcagactcagatcgcgtgaagcgtaaaaccgattaaggagatcgaccatacaaaaacggcggtatagatattgaatttcccggaactgtcgttttctttccgtttttcctccagcccctgaatgaacatgaccgcaccgagaaacacgagcataaccggctgtatgacagaggtatgttccgcatacgtaaatgcggcggccgcaagtataataatcagcatcgcgagtgacagttttaaggcgcgcagcaaagcaatccatcctttctgttatcattttttgaacacaattctatttctgtctttatcccccattattctagcgtattttttgcgcggatagaacgaaagtcggacaattttaagtttgttttaaggagcacgaaaagcgcgctcccgatgaaaaggagcgcgcggttatgagcgggcgaggcttccgtatccgagcccccgcaggacgcatgccatgacttcataccccttgctgttggggtgtacgcggtcatgagagagatattcattcatttttcctttgaaagcgctgtggacgtcggcaattttgacgtgcggcgccgatgcgagtgtgctgaggtgcgcattataagaggatatccatttttctgcaatggagatgcccgggaaaggattgtataaattgaagacgcggatctcataaggagacgggtgcggcccttttaaggcagcgatcttggcaatcatcttttcaaagttctcatggcagtgactggacacgctggtgaacaccgaagcgtccgatgtttgctgatatgcctgaaccgaatcgatcaaatcgttgccgcagcctgtaatcgtaatcatatcagcagcctgaatccgcctctgaatgtacggcaaggacataagcccgagaatttctcccgtctcaaggcctgatttggcaaagatggatacgtcggttcttgtctgtaaatcttctgccatcatacgcccgaaccgctggacaaaaccggcggaaaacggcccggatcccctccccgtcgtcaaagaatcccccagcgccgtataaacaagtcccatttactttcctccactcgttactatcgatattgtaatgtacgcgagtgaagaaaaattggctcggtcaataacccaatttctcagaaatatgctgtgcggcggttttgaccttttcggttaaatacggcagcctgtcctctgaaaaccgggcttcgaagccggcgatgctgattccggcagccaccttaccttcgtgattgaaaatcggcgccccgatcgccgccgtgtaatcttctaattccgaatagctgatcgtataacctgattgtaaggacctttcaatggattgaagcagttcagcccgatccgtcatcgtgcctgaggcgattgcggcaagctttgtcttctgaatgtatgtgtcaatctcctcttttggcagaaacgatagaatgcttctggcgcacgctcccgcgtacagcggagaccggcggccgattgccgtatacaggcggacggtttgagtgccttcaattttttcgacgtaaatggcttcatctccgtccctcatgatcagctgaacggcctcatccacttcgccgcacagctcttccataatcggtttagctattttcctgatgtccagacgttcagagacgagctggccgaattgtaaaaagatcagaccaagctgataacggccgcccgctgcccgggtgagaaatcccgtttcctccagcgagcttgccatccggtgaaccgaggtcttcggcatttccgatagagaaaccagctcatttaagctcaggctcggttcagtcagaaacaaatgaagcagttccattgatttgatgacggttttgtttttgttttccatggtctttagcccctttgtcagatcagccattccattttgagccttgctttcagctccttcagctgctgttccttctctaaaagcagcatttccgcttcctccagcgaaacggcccggaacgtgatatgttcccccggcatcgtttgggcgacgagaggaagatcagcggatatgatatgcgccatccgcggatagccccccgtcgtctgtctgtcagccagcagaataatcggattgccgtccggcggcacctgcaccgttccgaacgtcacggcctcagataccatctccagcggctcccgcaattcaagcggagcgcccttcagccggtagcccattcggtcggattgaggcgtgaccgtatatgactcttgataaaaacgcaattttgcttcttctgtaaaagcgtgaaattgagcgccttcaagcactcgtatgaccggattttttttcagcggcagaaatcctctgctgctgacagaccaatcaggcgctgagaaaccatgctgtccgaaagaatcgctcagacggtacgcgattgattccgaacatggcgtcatacggccgagcggcagctcatcatctttttgcagcgctcttccgcaaaagccgccgatccccgctctgacatacgtgcttttgctttccatgacggcgggcacgtcaaatccccccgcgacggcgagataagcgcggctccccatcttgcacggcccgaatgagacgacgctgttttcctttatcaaaaccggtttccacagaggggcgggctccccattaatatgaagggcgaaatcagctcccgtgacagcaataaccgcaggttctgaaaattcaaaggaaggcccgggccccatgagcgtaatttccagtcccgcctctttttcttgatttccggcaagaagattggcgatgcgcagtgagatcgtatccattgcgccgcttcccagcacaccgtatttctgatatcccgtccgccccgtgtcctgaaccgtcgtcaagagaccgggctttaccactttcatactcattcggctccctccttgatgcggctgtactcctctgccgtgatccggacgaatttcaccgtatcgcccgctctcaaaagactcggcggatgttcttccggcctgaaaagacggagcggggtgctgccgatcagctgccagccgccgggagtggatatcggatacacaccggtctgcattcccgcgattcctactgaaccggccgggatggacggccttggcgacgcctttctcggcgctctgatccgctcagacattcctcctaaaaacggaaatcccggcgcaaatccgagcatataaacgagatattcgccttcagtatgaatgcggatgacgtcttccggggtcagatcgttcatctcagcgacctcttctaaatcgagaccgaaatcaccgccgtagcaaacggggatttccatcacccggcgctcttctttgcggccggtcattatatggctgagacgttctgtcacttctttcttgaccagggcaaaaggagagacgcctttttttatgtttgagacggcatacacatcataaaagatcgttaagcttgtgaatgccggaatacattcaacgaagcccggaaacggccgttcttccatacaggctgccgccgcatgcacccagctgttgacctcttcgctgatgtgcccgccaaagcggatgataacggcggaatcaccgtacggctgtatatcaagcgctgtatttccgctatactgcatcattgtcatcacctcgttgtattctttctcacttacaggacagcaagcgattcatttcgtatatcggtgatcagcatgtgccccggtgaatgtgttattacgatgtcaggctttgcttccatgatcaccgcctggggcgtaacgccgcaagcccagaatacgggaacttcgccttcccgcaccgttacggcatctccgaaatccggctgatgcaaatcgctgataccgatgctttgcggatttccgatgcggacgggggcgccgtgcacggcgggaaaacgtgacgtgacctgcgccgcgcggactgcaagcctttccggaatcggtctcatgctgacgaccatctttccagaaaacgggccggcgggaacacagtcaatgtctgttttatacatggggacattcacaccctcatcgatgtgcctgattggaatgtgctgattaataagggcctgctcgaatgaaaaactgcagccgattaaaaacccgacataatcatccttccaatacggcgtaatatccgttacctcttcagtaagcacgccatgccgataaatcctgtatttcggaaagtccgtccggatatcagctcccggcgcagctattgccggaacgggtgaacccgcatccgtcacatcaagcaccggacaaggcttttgattgcgctggcagaataagagaaaatcaaaggcaagatccttttgcaaaacgacgagattggcttgtgcgtaagaagcggccatccccgccgtcggcccggtcatctgccccttcctgatcagctgtctgacttcttcggggctcatgtcactcatatggtttttcatatcatcagctccatagctgcggcatctgcgtgaataatgtatagatgcccataaccgccatgacaaccactacgatcgcccctgcaatcgtgagccagaccggatgcttgtaatcgccgacgatttttttcttataagcgcccaacagtatcatcgctaatgcaagcggcagaattaagccgttaagcgaaccgaccgcgaccagaattttggcaggctggccgatcgtaacaaaaataagagtggatacgatgataaaaccgataatgacgccatgtgagtgcttttcgatttttgttgaaaatgatttgaaaaatgataccgatgtataggcggcgccgatgacagacgtgatagcggcagaccacatgatgacgccgaaaattttatagcctacatttcccgccgcaagccggaatacagaagccgccggattatcaggatcaatgctcaggccctttgagacgacgccgagcacggcgagaaacagggcaatccgcataatcgatgtaatcagaacgcctgtgatggagcttttcgtaacctgagggaggacttccttcccttggatgcctgaatcaagcaaacggtggccgccggcaaatgtaatgtatccgccgaccgtgccgccgacaagcgtcacgatcgccagcacactgatatgatcaggcataaaagttttcacaacggcgtgtccgaccggcggagccgtcgttacggcaacatacacagtcaatacgatcatgacgattccggcgatctgcataaaacggtccatgacttttccggcttcctttatgacaaaaatcagcaccgcgaccgctgcgctgattaaagcgccgatctccggtttgatcccgaataatacttgaagaccgagacccgcgccgccgatgtttccgatattaaacgcaagtccgccgagcacgaccagaaaagcaatggcataaccggcgcccggaagcaccatattggcaatctcttggccgcgctttccggaaaccgcgataatccgccatacattggtttgcgcgaaaatgtccaaaataatagaaattaaaatgataaagccgaagcttgccgccaatgtattggtaaacgtggccgtttgcgtcagaaagccgggcccgattgatgatgtcgccatcaaaaatgtcgcgcctaaaagaagcgaccatttgccggaagcctttccggctgtttttttcttttgctccatgctgtcttcctccctctgctgctcagtcttttgaaagtgcgctgatttgaatgtctgccgcttttaattcttttttgattgtttttgcgaatgtgagggcgtgggctccgtctccgtgaatgcagaccgtgtccgctttcaggcttacagcttgtcccttacgtgatgtcaccgtgctgtctttcaccatttgaatcacttgaccgaccgcttttttgtcatcctgaatcagcgcatccggctctgaacgcggcgtcagcgtgccgtcttcctgataggtgcggtccgcaaacacttcgcttgccgtcctcagtccgattcgatctcccgctttaatcagctcgcttccggaaagcccgaaaagaataagcccgggatcaaaatgacagaccgcctgagcgatggcttctgacaggccgggattgacggcggccatattatataaagcgccgtgcggcttcacatgctgcatctcgacaccttctgcttttaaaaaccctgacagcgcgccgatttggtacagcgtcagatcatacgcttcctcgggtgtaatcgcgatctgccgccgcccgaatccctgcagatcgaacagcccgggatgagcgccgattttcacgcctttttccgccgcaagcgcaaccgttttgcgcatcacgctgggatcacccgcatgaaagccgcaggcgatgtttgcagatgtcacataatccaaaatctcttcatccagcccgattttataagcaccgaaactctctcctaaatcacaattgatgtcaatctgaaacataagatccctcctgtattgtaaacgttttatatgattatcattccgatattcggaatgactattccgaattgttggatttctcttcattatatttatttctgacaggtttgaacatccttttgtcagaaaacctaccatggacctagtcacaaatctgacaaaacaaaaaaagagagcctcatactgagactctctcttttttctattataacacccagtggcggatcgctttggcgaccccgttttccgtgttgacatcagtcacccagtcagctgtttctttcacaatgtcctgcgcattccccatggcgacgccgacacccgctttttcaatcatggcaatgtcattcagactgtcacccatggccatcacattttccatcgtgaagccgagtttttccgataccttcgccagcgcagccgctttgttgataccgagggcattgacttcgatgttgatcggactggagtttgtgatctcgagctccttgtattccttgagctctttcagcacctcattccgcacttcgtcatcctcgatttcgaatccgaacttgagccactgatgatccgtaatcgtttccgggaattcccctctccacactctatcgacggtagaggcccagaaattcgtgttgtgcttattcctcagatcccataatttttgaatatgatcggtatgaagaagcttgcgctcaaccagctcaaagtcggaatcccagatttcgctgccgtttgccgtgattaaaaaggatgacagctcgagagactcagccagttcgcggcaggtcatcagcgtgcgtcctgtgctgatgacgacgtgaattcctttcgcctccgcttccttgatcgcccgccggttttcctccgggatgagctgctcgtcattgagcagggttccgtccatatcaatcgcgatcagtttaatatctgcgtcttctctttgtatcggcatatatgtacctcactttttataatgtagtcgtctctattttaatacatatgacccacaggaacaaaaaaccgcttcctgcgtttggcggggagaacgttgaggaaaagaaatattgaggtgatggaggatgaaagaaagaaaacaaaagaacaaaccgaatgaaaatcctgaacatcatgatttaaccgatccgattccgctggaagagctgaaggaaaacgccaatgacgaaaaacacaaacatgaccaaagggacaattcacaaagtgaaagagattatgatacaaaataacaggcttgtccgaaagccgccgctggaggcggctttttttacgatggctggataaatatgctgagctcagcttccgccacaggcttcccggcaacggacgctttcgcccggccgaacacaaaaccgcgtctgattcgcgtgacctcaaaaaaaagatccagacggtctcccggcaaagcggcacctaacctttccgctttcttcaccgcggataagagaccgaggccgtcaccgccggtaattcccgcgcaagccgccgtttgggccattgcttcaacgacgagcgaaaatggcatctctctttgggattcagttataaaccagtcattttcactgatgtttttgtaagcagccgcccattttccggcttcactgttcgtcgtgccgtccatcaaaagaaacggaaaacgatggggcaatagcttctgattcatcacgcagcctcccttctctctcattataacgcaagaaaaaacccgcgtcccccgacgcgggttcatttttattgattgagctttttgagcacgatgccgtgcagcggttcatgcggctgaataccgcaaatgtcttgaagaacgccgctcgtgcctttttccgcgataagcttttgcagctcaaccgcttccggatcatcctgatagtcaaaacgcaaggcggcggcgatgccttctgccagcgcgttcggttcttttatttttttggccggccctactaatctgtcattcgctccgagttttctgagcggtgatctggcgactcttgtcacatcatccgtgatgtattcattttcaaagcggccgatgattttcttcatgtactgctcgtgttcggcttgcttaaagccgtacgctttcactaagtactcgcccgtttctgaaagtgcatcgtacacgacacgccggatttccggatggccgatggcctctttgacggtttttaatccgcgctgatagccgacgtacgccgtaacggcatgaccggtattgacggtaaacagctttctctcgatgaaaggtgtaagatcatccgtaaacaacgcgccttccagtaccggctggccgccggcaaagccggttctgtctatgacccattcaaaaaacggttctacagatactttcagcggatcttcatggtgctgaatcggcacgatccgatccaccgcagaatccgggaagccgaccgtccggttcacgagttcccgctccgcttccgtcaaatgtccgaaaactgcttttttcagaaaactgctgccgccgatcatattttcacaggcaatgatattgagaggctcagaggacgttctgcgcttcagcccttccgcgatggacggggcgatgagtctgagaacgttcgggcccaccgccgtcgtaatgatcgccgcttcattgatcagcctgtacagctcttgttcttgcaccgcgctgttgatggctgaaacggggccgatgatttctgtctgccggccgccgtcggcaagctccacggtatattccttcttttcattgagaaggctgaccatcgtttcattcacatcagcgaaaactacctcatagccggaatgatggagcagggcgccgataaagccccgcccgatgtttcccgctccgaaatgaagggcaatcatgtcagttcacctcgctgaaaatagcggccagttcttcttccgtctttgcactgatcagccgttcgatgttttcttcctctgagcagatgatggcgatgtttgacaggatgtctaagtgttcattgttttttccggcgataccgaaaacgacctttgccgtattgccttcaccgtattccacaccgtccggaatctggatgacggaaatgcctgaatgaagcacctcatccttcgcatcttccgtgccgtgcgggatcgcgatgaaattccccataaacgtggatgatgtttcttcacgttcgaacattttttccacatagccgttcttcacgtagccgttatcaatcaatgtctgtcccgcgaggcggatggcatcctcttttgagttcaccgtctggttcagtttgatgttcgctttagccaatacttccatgatgaagatccctctttctgttgattagtttttaagcttttcaatcagttcatcgtatttcgggctgttcaagaaattatcaaccgaaatgtgcaccgcctgcggcagcttcgctttcgcgcggtcagtcaggtccttatgcgtaatgacgatatccgcgtcattcggaagattattgatcgacgtatttgtcacatcaatatccaggtctgcttttttcactttgtttcttaaaatggaggcgcccattgcgctcgatcccatacccgcgtcacacgcgaagataatgcggctgacttggtcggcggaaatatcagcggcgctgttttccggctcttcctctttgtccgccaacgcggccgcagcttcgcttttcctgcctttcatttcctgcattttttccgccgcggctgtcaaatcttcttcgcccgctttagacgatttcagaataagcgccgagacgataaacgatacggccgcggcaacgatgacgcccgccagcacgccgagatagcttcctttcggcgtcagcgccaaaatggcgatgatgcttcccggagatgatgcggcgacaagacccgcgttaaagatcgagaatgtaagcagtccgctcgctcccccggcgatcgccgcgaggatcagcatcggtttcattaaaatgtaagggaaatagatttcatgaatccccccgaagaaatgaatgatcgccgctcccggagccgtcgatcttgaagagcctttcccaaagaacatatatgccagtaaaataccgagtcccggcccggggttcgcttccactaagaacagaatggatttacccgctttggcggcctgctcgattccgatcggacttaaaatgccgtggttgatcgcgttattcaggaacagaactttcgccggttctacgaaaacgcttgcaatcggcagcaaattcgcgtggacaatgacttccacacctgccgccagcaatttgttaagagacaggacgaccgggccgatcgcataaaatgcgataatcgtcagcacagctccgataattcccgccgtgaagttgttgatcagcatttcaaaaccctgtctgactttatctttaaacacacggtctaattgtttaatgagataaccgcccaaaggccccataatcattgcccctaagaacatcggaatgtccgctccgacaatgactccgatggcggccgtcgctccgacgactcccccgcggtgatcgtaaatcatttttccgcccgtatatgcgattaaaagcggcagtagatacgtaatcatcgggcttaccaatgtattcagctgcggattcggaaaccatcccgcaggaataaacagcgcggtgataattccccatgcgataaatgcgccgatattcggcatgatcataccgcttaaataactgccgaaccgctgtatcttcactttcatgccagcttgctgttcttgctgcatgttcattccctccctgtttgcttgccttcagatgaaaataaataagacacggggtttctctctcccctgtgtcttcatcataaaacgcttacaatccccattcaatgaaaagtaaagaggagtttggcacagagactgtgacaactccttaacaaaaaaaagacacctcatcaaaggtgtcttaccgctttctgtatataatgtgtccttttgtgacgacgagtttggcaatgagccgctcactgacaataaacaccggatacgcacatacgagcgcgaaaatggcggccggcacataccgcgctgccggaaacatcggcatgacggcggttctggccatctgcacaagataaatcaaaagcaccgtgatcgcaatggccgcagccataatcggagctgatactttatattcacgcaatttcacatggcaatgcccgcactgaaactggcacgggatcatggatgatctgaccatgtcgcctgtaatcggcttgccgcagttcgggcaggtcgtttctttcatgtttattcctccattcaactcttctattataacagagtctgactacgtcttttacatttgtgattgttcaacattttttcacatattttatcatcaggctcttgtgtgcatttgtgaaaacatctactcttagagggaggttcatcactcattcgcataaaaaggaggatgcagaattgcttccgattcacagacagcaaaccttgcttgaatggctgaaagaagagggcgcgctgaaaatctctgacataagcgagagattcggcgtctccgagatgaccgtgtacagagacgtcaatcagctggcggatgcaaaccggattatccggacacccggcggcattacgctccctcccgcttcagaacgaagcgccaatcaatgcggctattgcctgcggccgattcagcattcgtattctgttcagcttattaccgtttcacaagccgttgagcagatgtgctgcattcattgcgcgattttgcggtatgaggataaaaaggaagaagtgtcccacgtcatttgtaaagattttcttctccagacgacgctgacggccgcttccgcatactttttagtccatgccgatattgaccttcactgctgccggcctcaggcgattcccttctcaacgcttgattacgcagaacggtttcaaaaaggattcggcggggtcatttgcacctttgacgaggcggcggacatcatcttacacgacaggcagaagggatgcacctgcagcaagacataacaacaaccaaccggaaggcggtgtcatcatccatgagacagaacaaacgctggctcatctttttgctgttccttgttttgattccgaaaacaagcttcgcccacgcctacatcacaaactcaaatccgggtgagaacagcgaattaaaacaagcgccgaagcagattgaaattgagtttaatgaacagattgaagaaggcttccactccattaaggtctataattcatccggcgaacgggtcgatgcgggaaaaacggtgattcaaaaaaatgatgcccgcatcatgaccgcggcattgaaaaaaaatctgccgcatgatatttacagagcggaatggaacgcggtatcggccgacggacatccggtatccggcgtcatccctttcagtatcggaaaagccggcggagaacttcgggagcagacatcatcgcaagcggcgcttcatcccgaagcggccatcgaccgcggtattttgtacatcgctctctccctgtttatcggcacggcttttttccatctgttttggtacagaaataataaagattcatcaaaagcaaaacgaactgtaaagctgctcgtgatttctttatgtgtaacggggctcgcgcttatctgccagctcccgatccagacgaaagaaaacgcgggcggcgcttggagcgccgcgttccagccggactatgtaaaagaaacgcttctgaaaacggcaggcgggtacgtctggatgatccagatcagcttatttatcctgctcgccctgtccatgatcccgctgttgaagaagaaagcattccggtcatttgcgtactggacggcgccgctgttgttcttcttcgcttcgcttttggcaaaagcattcgccgggcatgcggcggtcattgacgaaaaagcggtcggcatcgcgatggactttctccatttatcggccgcgtctgtatggatgggcggtatcgccgcgcttgtgctgcttctttcatcagagtggagaaaacccgataaaaccatcgcttgggaaacggtcagacggttttctccttgggcgttcgcctctgtcggtgtgctgttattttcaggtgtgctgaacggatttttcattatccgcacgtttgattcactctttcacaccgcttacggtaagacgctccttttgaaaatcggactgtttgttatcatgcttgtgctcggcgccgttcacgtatggatgacgaagttcagcagaaaaaggagcatcagcgcaacgataaaggccgaatgggcactaggcatcgcggtattatttacaaccgccgtcttcacaagcctgcccagcccgccgccgcctgcgccattgccttttaacggctcagaaacgatcggaaacggggaaaccctgtccttgcacattacgccgaaccagccgggtaaaaatgaatttcaagtcattgtcaccgatcacaacggcagcttggtaaaagacattcagcaatttacggtcactgtttaccagacgggcttcagcggcaaacagcatgaaagcacctttgatttgaagaagacgaaggaaggcacattcgaagccgccaacctgtccatcaccgaaaagggaaactggaagatcaaagtccacgggctgacaaacgattttaatgaaatcaaccaaatattctcaacgacaaactaaggagtgtatctcatgttgaaaaaaaaggctttattattcatatccgccgtgaccctgtcactcgtcggttttacggcgacagcaagcgcccacgtctcagtcaaacccgcggaatccgcggccggttcctgggaaacctacacgatgaaagtgcctgtggaaaagaatgagccgacaacgaaagtcgtgctgaaaatgcccgccggcgttgaatttcagcagtatcagccgattccgggctggaaaacatccgtatccaaacatgatgacaaagcggtctccgtcacttgggaagcaaaagacggcggcattcagcccggccaattccagcagttcacgttcgttgcgaaaaatcctgaaaagagcggagatgccgcttgggacgcttaccaatattacaaagacggcagcattgtagaatggacgggtgatgagaaagccgacacgcctcactcgattacgaaaatcacgaaatcggccagcgtgacggatgcgcacggagctgaacagtcaaacgtagaaagcaaatccggcgtatcagcgcttgatattgcagccatcgttctgtcagctgcggcgattatcctttccatcgcggcgcttgtaaagaaaaaacgcgcgtaagcaaaaagcgatccggctctaaagagcctgcgatcgctttttttcttatccgcggcctgcctggaatgacggatatttggtcattcccccgtcagcaaacagcgtaatgccggttacgtagcttgattcctttgaagcaagccagacggcgacagccgcgatttcttccggctcaccgatatatcccatcggaatcatgctttccacatcttttttctgaacgggatccgcaaatttttccgcgttgatcggcgtattgatggctcccggcccgatgttgttgacacggatgcgcttcggcgcgtactcaagcgccagcgtttccgtcatcaatttgatgccgcctttactcgccgcgtagtgaacaaacagaggccatggaatcatttcatgtacgcttgacatgttaatgacgtttccttgaatatcattctctacgtaatatttaatggcttcgcggcttcctaagaaagcgccggtcagattggtattgatgactttgttccagtctttgagcggcatttcatgcgactgaaccggattttccataccggcgttattgatcatgacatccaatgtgccgaattccttcaccgcggtctgcacgatgtttttgacatcttcttcttttgtgacgtcgccttgaatgatgaccgcttcgcctcccgctttttgaatctcttctttaacggtttgggcgtctttttcattactatagtagttaaccacgactttcgcctgctcctgtccgaagcggatcgccatcgcttttcctaatcctgatgaagctcccgtaatggcaacgacttttccttttaaatccgtgtacatgttcaaacctcctgcatttgttatgaatttgatttcgcaacgcctaagaataccgcggccacaatgatcaggataatcccgatggcaatggcgaccagctgacgcttcgttttgctctcacggagaatgaagattccgccgagcgtgctgatgacaatccccatttgagagagggaaaaacttgtcgcaactccgacgcgcggctgtgagatgaacagaaacatattcccgagcgcccagatgattcccggcagaatgttcttgagggcgtacttattaaacggtttatgcttgtacgtcaggagcagtccgccgatgaccatcccgatcgcctgcggcaggagcgctgaccatccggatacgccgaacagccgggccacaacgacatagaccaaataaccgagcgtggagatcagcaggatgacaatgcctttttttaagtttcccggttctccgtccgcccgcccctttttatcttctaaagatgtgagcacaatcccgatgatgataaaaataagggcgagaatacccagcgtaatcgcgatcggggttgaccattctttgaatacgatcacaccgaacaaagaagtcgagacgagctgcattcccgttgatatcggcatcgtttttgaaacgcccatcagctgtatgcttttaagctgattgctttggccgagcgaccaaaacagccccgagatgatgccgacaataaaaatgcgcccagacagcaccgggtggacaaacagatacaacacaaacgaaacgatgagcgccccgattgtcgttcccagcgtctggctgtaaggcccgccgcctaatttgacgttaaataacacgatgctcccccaaaataaagccgggagaagagccagtaatatatccatgatggcgaccttctttcaatcgtatttgctgttattttgtctggaatcgaaccgattattcccgcaagatcaaaaaagcctgccggcgatattcaccggcagactgctcaataaaaacagccccgcttagaagcggggcttacttttcggctcattaaagtccgatagacatgtatttggtttccaggtacggctcaatgccttccgtaccgccttcacggccgatgccgctttctttcattcctccgaacggcgcttgaaccgcggacggaccgccgtcattccagccgatgatgccgtattcaagctgttcagaaatatagatgccgcggcggtagttttctgtgaagaaataagccgcaagcccgaacggcgtatcgttcgcaagcttgatcgcttcatcaatatctgagaacgtaacgatcggcgcaaccgggccgaatgtttcttcatgcatgatgttcatggatgtatctacatttgacagcacggtcggtgtcacgaaatagcatcctttttcatcgttttggtcatacgttccgcccgtcagcacttttgcgcctttttccacggcgtcattaatttggccgacgattttatcgaagccttttttgttgatgacagggccgacgtttacgcctttttcaagaccgtttccgactttgagtttcgcagcttcttcactcagttttttcgcaaactcgtcttttacggattcgtgtacgatcagccggttcgcacagacgcaggtttggccggcatttctgaatttagaggccattgtttgggctaccgccagatcaagatcagcgtcttcatccacgatcagcggcgcatgtccgccaagctccattgacatatgttttacggtgtcggcgctgtttttcatcaggattttgccgacaggcgttgagccggtaaaggtaattttgcggattttcgggctgctggtgaagacgtttccgatttcggctccgtcaccgatcaccacttgcagcacgtccttcggaattcccgcttcatatgcgagacgcgcaagggcgtaagcggaaagcggcgtatcctccgccggtttgatgatgaacgtacagcctgccgccaaagcgggcgcggcttttcttgtaatcatcgcattcgggaaattccacggcgtgatcgcggctaccgggccgaccgcctgacgggtgacgacaatccgtttgcccgttgtcggcgcaggtactgttctgccgtaaatccgttttgcttcttcggcgaaccattcaatataaccggcgccgtataaaacttctccgaccgcttcttcgtacggtttgccgttttctttcgtaattaattccgcaagttcttctttattttcaacaatcagctcataccattttctcaaaagtgaggcacgttctcccgctgatgttttggaccatgattgaaacgcttgatgtgaacgttcaatcgctttttcaacatcttcggccgtctgctgggggatgctttcgatcgcctctcccgttgccgggttgtacactgttaattgttctggcatattgaacattcctttctctgctatagtaaagccattgaatgctagttgatgtatctcacactttcatgatagcagacacatccgccggcattccaataattgaactcacagagctgcttcgataatggaaaggccttctttgagctgctcatccgtcacgacaagcggcgtcaggaatctgataatgttgccgttaatgccggccgtcagcagcagcagtccgttctcgttcgccgttttggcgatcgccgcggcttttgctttgtccggttcccgcgtgtccggatctttgacaatttcgatggccgccatcgcgccgagtctgcgcacttctccgatacaggcatgctcttttttccactcaagcgcttgatgctcgatgatccggccgatcacctcggaacgctgattcagaccttcttcttcaataatatccaagaccgcaagcgcagccgcacagccgagcgggcttcccgcatatgtgcccccgagttcccccggcgcggcggcatcaagtatttccgcccggccgatgacgccgctcagcggcaatccggccgcaagtgatttggaaacggtgatcaaatcaggaacggccccgaaatgttcaatcgcaaaatacgttcccgttctggcaaaaccggtctgaatctcatccgccacaaaaacgatgccgtgtttttgacaaaaagcggcgacgtgctggacgaaacgttttgacggaatgatgaagcctccttctccctgaaccggctccatgacgacacaggcgacggtttccggtgcaactgcggcgataaagaaatcctcaaaagcgctgatgataaagtcgtcatactgctcgtcgctcatgccggccggcttttgataatagtaaggaaacggcgcctgatacacctctgaggcaaacgggccgaaaccgaatttataaggcttcaccttgctcgtcatgctcatcgtcatgttcgtgcggccgtggaaccctcttgtaaatgacacgacagcctggcgcttcgtatattttctggcgattttcacggcgttttccaccgcttccgcccccgaattgagaaaaatcgcttttttcgcatgatctcccggcgcaagggcgcaaagtttttcggccagctcaatataagacggatacatcatgacgttaaatcccgggtgaatcagatcctccgcctgtttcttcacggcctccaccactttcggatgggaatggccgacattcagcgttccgatcgctccggcaaaatcaatgaatcgactgccgtccaaatcgtacaaaagcgccccttccccttttaccgccatgctgcggtttccgttgccgacccccttggaaacgaattgatcccgtttttgctgccactgggcagttgtcacttccgatgatgctgttcgactcatagattccatccccctgcattgttttcttatcattctgacttctttttggtatgatgaaaagtaccaaaatcaatttatccatggtatcagaaaggggcatggtctggatgctgacgatttccattgatcattcggaaacggcggattatatctatcagcagatctatcagcacataaaagcggccgttttaaagcgcagcctgatgcctcatacaaaggtgccgtctaaacgggagcttgccgagacgctgaaggtcagcgtaaattcagtgaattcagcttatcagcagctgctttcggaaggttatttatatgcagtcgaaagaaaaggttttttcgtggaggaaattgatacggtttatcatgaagaagcgccttcgctcctattgcctgatgatttgaaagagcgggagacggataagagcggttggatttcgttttctcatatgagtgtggatacggcgcatttccccctgaaaagctggttccgctgtgagcagaaagcagccgcccgttcatttcatacactcggagaactcgtccatccgcaaggcttatatgaagtccgtgaaacaatttcgcggcttatttccctgacaaggggcgttacatgccgcccggaacaaatcgtgctcggggcgggcacgcaaatgctgatgcagctgctgacggaactgctgccaaaagacgcgctctatgccatggagaacccgggatatatgaggatgtaccggctgctgcaaaacctcgggaaaaaggttgcgacgatcagccttgatgaaaaaggcatgtccatggacgaaatcgaaaaacgccggccctctgtattgatcaccacgccttcccatcaattcccctcaggcgtgatcatgcccgcttcccggcggattcagcttttaaactgggccgccgaacagaacggccgcttcatcattgaagatgattatgacagtgaatttaaatatgacgccgatacgataccggcgcttcaaagccttgaccggtttcaaaatgtcatctacatggggaccttttcaaaatcccttttcccaggtctgcgcatcagctatatggttctgccgcccgggcttttgcggacgttcaaagagagaacgtatgacctgcatacgtgcagcacgcttgcccagctggcgctgaaagaatttatcgaatcaggtgaatatcagaaacatattaaaaagatgaagcagcattataagaacatgcgggaatgcctcatttcggctttggaagaaacattcggaggaagaatcagtgtaaagggcgccaatgcggggcttcattttgtcactgagtttgactgcgcctgttcagaaaaagagattttggcacgggcggatgcagaacagctcgatctgtttgcgatgagccggttccgtctgaaagcgggaggcgattcaaataagccgcagctcattctggggttcgcccgcctgaaggagagcgatattcaagaaggcgtcctcaggctttaccgggcggttttcggcgcataaaaaaacccccggaattcggggacttatttaccagcggtccggctctgtctgcaaaatcgcctccagcaggccgggaaacgccgcttgtaaatcatctttgcgcagggaataataacggtgcttcccgtctatacgtacttgggcgacccccgcttcccgcagcactttgaagtgatgggacagcgttgatttagcgacccggacatcagcgcaggttccgcacgttttttctgttgtttccgccaattgtttgaccagctctaagcggagcggatcactcagagcatgaagaacctttgtcagctgtaagcgttcggtttcaggatggtttggaatgttcatgagtcaaatgtaacacagatcatcggcgggtgacaatttaggcggtgagggtttttcctttaccattcgcagcgaaacatgttacagttagttcgatgatattcgaactataacaaataaacccaatcaggaggaataacaatgatcgtcttacaggcttacatgaaagtaaaagcggataaacgcgaggaatttttaggagaagcacaatcacttgttcagcattcacgcgcggaagaaggaaatgtgcaatacgatcttttcgaaaaagtcggtgaggaaaatacattcgttatgcttgagcaatggaaagatgaagaagcgatgaaattccacaacgcaactgaccatttccaaggattcgtggcaaaagcaaaagaagtgctgagtgcgccgcttgacgtcgtccgcacagaactgtcagagtaacgaaaggatgaatgacatgaacgaagtccttcaaatattaacagaccaccgttccatccgcagctacacagatgaacccgtatcggatgagcagctggaccttatcatccaagcaactcaggcagcgccgacttccattaacggccagcaatttaccgttattgcggtgaaagataaggagcggaagaaaaaaatatccgaattggccggcggccagccgtggattgaccaagcgccggttttccttttattctgcgctgattttaaccgcgccaaaattgcgcttgaagaatataatgatacaccgcttgagatcacgaacggtttagagtccgttctagtcggagccgtagatgtcgggattgcgctgggtacggcaacggctgcggctgaatcaatgggactcggcactgtgccgatcggcgccgtgcgcggcaaacctgacgaactcattgaattgctgaaacttccgaaatacgttttcccggtttccggtctcgtcatcggccatccggcagaccgctccgcgaaaaaaccgcgtctgccgcaagcagccgttctgcatcatgaaacgtatcaagaagaagatgtaagaacccatatcgaggcctatgacaagcagatgtccgaatacatgaaaaaacgcaccgacggacaggaaacaagaaactggtcacaaggcatcacttcctactataagcaggtttattatcctcacattcgtgaaatgcttgaaaaacaaggatttaagacggataaataaacgtatcagcctgccggaacactccggcaggttttttctatttctcaaacaaaagcgttgacactatgtaaaaatttttgttaatattttcatcatatactcattggttttctgtgaaccgatgggttttctattgtgacgaaagaaggaatctgggcttatgaatgataagaaaacggatattctgctggcggcaaggaagcttttttccaggaaaagcttttcgtcggtttcgatgcaggcgatcgcagaggagtgcaaagtctccaaagcatctttatataagctgtttgaatcaaaggaagacctgctgttggagctgctcgactttaaccagaaacagatggtagccgcggcttcattattgaatgaagaaacaagcctctcccctgaggaacggtttgccaaaaaactgatggctgagcttgaaggcttcaggcgcaatcagcagttttttaatatgctgatgtacggaagcccctcttccattaatgagcgggtaaaacggcatattcacagggcccgctccacctttatctgctggcatcgcgattcactgattcagacgtacggtgaagacattattccttatgtatgggagctggtaatcgtcctgcaagggctcctgagagaatgcatcacgctgattaagctggaaaaagaaccgctcgccctggagccgctcacggagtttatcatccgccacctcaatctcatcgtcgaaaacaggacaaccgaaaccgctttgcctcaggagatgattgacctttatatcgcctccgcttcctcatttgagccgaaagacaaaaccgtattgctggctgaaagcctgaaggaactgaaagaagccgtctcagcccttccggaggaaaaatatgacgccgcaggactcgcttccgctgcggctatgctggagaaagaatcagcggacaaacagccgcgggattttctcatcaaagcgctcatcggttatttggagcaggccggaccgctgcaccagccgcttgcagccgttaaaacattgctcaaactataaagaaagaaggaatcagcttgaataagagtattaaaactgcaccatacaaccgctctgtcattgtcgggattcttttggcgggtgcgttcgtcgccattttgaaccagacactgcttattacggcgctgccgcacattatgaatgacttcaatatagacgccaacaaagcgcaatggctgacaacatcgtttatgctgacgaacgggattttgattccgattaccgcgtttttaatagagaaattcacaagccgcaccctcttgatttccgccatgagtattttcacggcgggcaccattgtcggcgcattcgccccgaactttccggtgctcttaacggcccggattattcaggcggccggcgccggaattatgctgccgctcatgcagacggtatttctcacgattttcccgatggaaaagcgcggccgcgccatgggtatggtcggcttggttatttcgttcgcgccggcgatcggcccgacgctttccggatgggcggtcgaagcattctcttggcggtctttgttttatattatcttcccgatcgcagtcatcgatttgcttttagcgattattctgatgaaaaacgtcacgacattacgagaaacacagattgatattttatctgtgatcttatcgaccctcggattcggcggtctgctttacggcttctcaagcgccggttcatcagggtggaccagtactgaagtgctgacttcgctgcttgtcggagcggtcgcgctgattttctttatcgcaagacagatgaagctcaaaaaaccgatgctggaattccgtgtgttttctttcgggattttcagcctgaccaccctgctcggaacgcttgttttcgcgctgctgatcggaacggaaaccattctcccgctttacacacaaaaagtccggggcgtatccgcgtttgataccggattaatgcttttgccgggcgcgattgtgatggggatgatgtctccgtttatcggccgggtgtttgacaaaatcggcggaaagggccttgcgatgaccggattcttcatcatcctgctcacgtccctgccgtttatgaatctgacggactcgacgtctcttatttggattgtcgtcgtttataccgcgcggcttttgggaacagccatgattatgatgccggtgacgacagcgggaatcaacgccctgccgcgccacttaattccgcacggcacagccatgaacaataccgtccgccaagtcggcggttctatcggtacggcgctgctagtttccgtgatgagcagccaggccgcgcacgcaaatgcgacaactccggcaaacgccgccctgcacggcatgaatgcggcatttgtcgtagccgcctgcatcgcgctggccggcttcctcctatcttttatattgaagaaaaaaccgcgtcagcccgagcagcagcaggccgttacgcggtaaaccaaaaagaacccgatcacgtatgtgaccgggttctttttttacttctcgattccgtctttaacttctttcaccatttgcgccatggattccaggccgcctcctgataaataccatgtagctgaatcaaggtagacaacatggttgtttttcaccgctttcaccgattttacataatcattttcaaccacttgttttgttgaagattttgtgccgatcgctgttccgcggtcaacgacaaacatataatcagggtttgttttggcgatatattcataagaaatgctttgtccgtgcaatgaggcttcgatgtttttgtcagccggtttgacgccgaacacatcatgaatgaagccgtatcttgatttagatccgaacgcgctgattttgccgtcgttcgccatcaccactaacccgtttttatccgtgctgcttgtctttttcttcagatccgcaatggatttgtcaattttcgcaagcttatctttcacttcattttctttgttaaagattttgccgatcacttcggtgttgtgcttgaatctgtcaacgtagtttgtatagtcatcatcaaggtaaatcgtcggcgcgatttttgagaactctttataagaatcagattgtctgtgagcgataatgattaaatccgggtcaatatccgcgactttttcaaaatccggttcttttaaaccgcctgtattggtgtatttatcacttttatatgaagataagtattttggaatgttttgtttcggaagccccgccacatgatcctgtaaacccagttcatccatcgtgtccagcattccgaagttgaatacgacgacttttttcggattcttcggcactttgacgccttctttgttcaggtcatctttgattgtgattgtttcttttgatttgcctgatgttttgtccccgtttccgcatgcagaaacaacaaaaatcgtaacgagcgcaatgaatagcaatgcgaattttttcatgattttcacctcatctggtttttaagaaaagtacacaccgatccgctgactgtcaatctcttgaatcgggatggtcatatcataaatatcttcaagcacggaggtttcaatgatctcctccgccggcccttctttgacgatccggccgtttttcagtgcaacgatatggtctgaatatacggatgcgaagttgatatcgtgaatcactacgacgaccgtttttccgaagtcttccacaagccgcttcaacagcttcatcatttcaacggaatgcttcatatctaaattgttcagcggctcatcgagaaaaatatagtccgtatcctgagcgatgatcatcgcgataaacgccctctgacactggcccccgctgagctgatcgagatatttatcctttaagtcatccagcttcatataactgagtgcctggttgatatgcacccaatcttcatccgtcagtttcccctgggaatacggaaatctgccgaagctgaccaggtctttaatcgtcagcctgatattgatttggttcgtctgcttcaggatgctgattttttttgccagatcgttgcttttacaggccccgatctcttgcccgtcgaccgtgatttccccggaatccgtcttaatcagccggctcatgatagacagcagcgtgctttttcccgcgccgttcggaccgataaatgaggtgagcctgcccttttgaatggatagagacgttttctcaaggacggttttccctccgtattgtttgcttacatttttgacctctaccatgatttattctcctttaacagcagatagataaaataaatcccgccggcaaaattaatgatgacgctcagcgtcgtggaaaacgtgaacactttctccacgacgaactggcccccgacgagcgcgacgatgctgatcaggacagaacctgcgattaaatacgtgtgcctgtaggtttttaaaaactctctcgccagattgacgacaagcagtcctaaaaacataatcggtccgacaagagccgtagagacagaaacaagaatggcgacgacaatgagcatctgtttcacaagcttatcgtaatcaatccccaggttgacggcgtgctccctgccgagcgacagcacgtcaaaaaaccgcgtgaaccgccagacataaatgcccgtcagaagaaagacagcaccggcaaaccctaaaagatcggtattgatattgttaaaactggcaaacattttgtcctgaacaacctggaactcattcggatcaatcagcatctgcataaaggatgacagactgttgaacagcgtgccgaacacgacgccgacaagcagaaggaaaaacacgttccgcccctcgcctttaaacatgagctgatacaaaacgagtgacaagagcaccatcagcccgacggagatgacgaaattaagatttttgttcatcatgacgatattcattgaaccgaacaggaacacgatgacggtctgaatgagcatatacagggaatcgaggcctaaaatgcccggtgtcagtatgcggttatttgtaatcgtctggaagatgaccgtcgaaaacgcgatcgctcctccggtgagcatcatggcaagcactttgaagcatcgtctcggcagggagtattcccaattgcccagtccgtagaacaggaagaatccgatacatatcatggcgagcgccgccagcagcgtaatttttttattatgactcatatgcttttctccttaacagcatatacaggaagatgccgctgccgataacaccgaccatcaggccgatggaaatttcgtacgggaagataatcactcttcccaaaatgtcgcaaaacagcacaaaaacagcgcccagcagagcggtgtgaggcaggctgctcctcaggttgtcccctttgtaaatcgacaccatattgggaatgatcaaaccgagaaacggcagcatcccgacggtcaggatcaccagtgaagcgatgagcgacacgataatcagaccgatattaacgacgcgtttgtatttcaggccgagattgacggaaaagctctctcccattcccgccaccgtaaatttatctgcatacacataagcgatgatcaccagcgggatactcagatataaaagctcataccggcctttgacgaccagtgagaaatctccctgcagccatgatgacaggttttggatcagatcgtatttatatgcgataaacgtggcgattgagctgacaatattcccaagcattaaaccgacgagaggaataaaaatcgcatcattgaacttgattctctcgaggattttcatgaaaaggaaattccccgccaacgcgaaaacgaaagcgatagacattttcacaagcggactcgctgacgtaaaaagcattaatgaaatcaagattccgagccttgcccagtccatcgtccccgcagtcgtcggcgatacaaatttattccggctgatctgctgcatgattaatccgcagatgctcaggctcatgccggcgatgataatgctcaccaaacgcggcagccggctgtcaaacaatgtacctgcctgttctttatttaaatgaaaaatatccagcggcgacaaatcttctacaccgataaatatagaagtacacgccaaaaccgccagtagcaaaagtaagtaacgtagcttcatgctgcctccctgcacccatcacaaacggtatgactgattgccaaacaactcccatatatcccactcgtaatgattatcattatcaacgacaattataatcttatcatctttccaagcgcagtcaatacagttttgctttcaaaagcggtcatccgcgggccgtacactaaattgtcttacaatcagtctatcaagaatttgcaggattttctataacctacatttggctgcttatcattttttgcacatgatgacacgcttgagggaaacaaatctgacaaacagcggcaaaattcctccatgaaaatacaaatgttctccccacgtagaaaaaatccttgatttacatgtttgaaagagagataataaaaattaaatttgtgagaaaatttaaatattaggggatgtaaatcatgaaagttgtaaaattcggaggcagctctcttgcgtcaggagcccagcttgagaaagtgtttcaaatcgtgacggctgatcccgcgcggaaagccgtcgtcgtatcggcaccgggaaaacgcttctcggacgatacaaaggtgacggatctgttaatccgctgtgcggagcattatttgcaaaaaggtgcaacgcccgagcttgccgaaacggtcattgaacggtacgccgccatcgcgcgtgagctgaacctggatttctctattatagaaagaatccgcagtgacctattcgctcttttaaacagctgtaaaaccaatcccgaacaatatatggatgcggtgaaggcgagcggcgaggacaacaacgcgaagctgatcgcagcctacttccgacggcagggcgtgaaagcggaatacgtaagtccgaaagaagcggggctgtttgtgacgaatgaacccggaagcgcgcaggtgctccccgagtcttatggtcatttgtaccgtctgagaaaccgtgaaggcttgatcatttttccgggatttttcggttacacgaaggagcatgagattgtgacgttttcccggagcggttctgatattaccggctcaattctcgccagcggcttaaaagccgacctgtacgaaaactttactgatgtggacgccgtctattccgtcaacccgtcaatcgtgcggcatccgaaagaaattaacgaactgacgtatcgggaaatgcgtgagctctcctatgccggattttccgtttttcatgatgaagcgctgattcccgcatttcgggccggcatccccgttcagattaagaatacgaataatccggatgcgaaaggaacacgcgtcgtcagcagccgtgacaatacgaacgggccagtcatcggcatcgcaagcgacacgggcttttgcagcatttacataagcaaatatttaatgaaccgggaaatcggtttcggccgcaaagcccttcacattttggaggaagaaggattgacgtatgaacacgttccatccggcattgacgacatcacgatcatccttcggcacaatcagatggactcagaactggaacacaggctcgtcacccgtctgaagcaggaacttcaagcagatgaagtcacagtcaggcacaatctggcgctgattatggtcgtcggggaagcgatgcgccataatgtcggcacaaccgccagggcatccaaagcactgtcggaagccggcgtcaacatcgagatgattaatcaagggtcatcggaagtcagcatgatgttcggagtgaaagaagaacaggaaaaacacgcggtgcgggcactgtatgatgaatttttcgccggagtcttactctcataggacaccgcctcttttttctcttgtccactaatatcccttacaaaacagcttcttttacatattgtatggtatagacaatatggaggtgaagctcatgtcaggatattctggagtcagctctttcgctttgatcgttgttttatttatcctgttgattattgtaggtactgccttcgttggcggtttctaaacatcactccgtctatatgaggacgctgcgggttttgacctgcggcgttttcttttgttttccgccgctgtccaagtccggccgcgcaaaaaagactgccgagaacattctcgggcagtcttttcctttgttcaggttattttcttctcacgtcattcctctttcagctacatggaattcagcctgatctgtctggcctgcacctgtcactgtaaaaatcgcggcggctgctaaacaaataacaaaccatttagatttcaatttcatacaaaccctcactcctttgtatttgtttccttgcctcttcgactttcagaaaatagtcagaagaaattttaaagcaattttgttcatagtaatatttagctgcttctagtgctaaatcctctatatcggcgtataaatttttatcttccaggtaacggaaacacgcgctgattgtttcctcatccggtttcgcctgatacagagcctgcagccattcgaattttaccgtataaacgggatcgtctgtttctttagcatattcatatccccgcttgtgatattccgacgctttttctttttttccgagtttaaagtaaatgagtgtgattagaaaatatgcttgaggaagagaattgacgattctttgtgattcaaatgtatcgaccgcccgttcaaagtacggaatcgcttcgccgatgcggtcctgattgtagtagcacagtccgaggttatacagcgccctcccgacaagctgcgctttttgttctttttcggccatttgcagagcgtgctgaaaatgtttggccgcctgttcaaagcgcctttcatccattaaattgacgccgaatacaaaatggcattgaatgatccggacgttatatgtgtcctgctctacgtaaatttcataagcgttttttatatgtatcaaagaaaaatacgtttgtttcatatgataataagcttcggccactttaaaataaaactccgcccgttccacgtggtccgatacgaaggccagttttttctcagcttgtttataatatgtaatcgctgagataaattctcttttatcaaattcaaacatgcctttgaaaaagttgacgtaataatcgagaagccctttgaggccggcctggctgttatcaatgttatcaagaatttccgacagggtcggctggtcttctatcttcagtttttccagcggctccaagtagtccagcatcagctgatggcgaaattccatgagggaataataaagcactaagttcgaatcaggctccatatggtcaagctcttgtttgatctcggccttcaagatctccgcatccggcacgctgaatgttctgatgtatcgataccactcgttaattttctgcccgactgctgaagaaggaattaacccgctcttcattccttcaccctccccatccaagacctgtttaccagttattttatcacgtttccgtctctttccatcccgaaaaacacgcaaactttgtttcggcagagcgcaattttccgagtggagttaaaacaggcggcggccagacgggaccgccggtttcaagatgattcatttttcgtattcagcggaaggcggattgtaaaggtcgtgccttttcctttttcgctgtcaatatctatcgtgcccttgtgcatttcgacgagctgcctgacgatggacaggccgagtccgtattcgccgtatgccgtattcgtccgggacacgtccgccttataaaaccgctcccatatatgctcaatttcttctttggagatgccgatcccggtgtcttcgatttcaatcaccgtttctttatagccttcatacccgcgcagcgtgatgtctcccttttgcgtaaattgaatgctgtttttcgtgatgttgacgagaatctggatcagcctgtcataatcggcgaatactttgacgccgtcctccacttgaatccgcagctgattttgcttttcctccgcctgctgattgagatgctctttaataatttcaaacacctcgatgagcggcagactgagcttgtccagtttgatttgctgggatctgattttttcataatccaggttttctttcacgagcctgagcatccgcttcgtttcttcgctgatcagcgagaagcatttctctttatctttttccgggatggtgttgctgttaagcccctccacaagtccgttaatggtcgtcaaaggcgttctcagctcatgggagacatcggcgataaattggcgcctccgtttttcaaggcggtcaatctgctctctcgattgcttcagatttttggccatgatgttgaaatcggacgccagcttgccgatttcatcgccgccgctgtttttaagagaaatatcataatcaccggatgccacttttccggtcgcatcccgcaatgtctgaatccgcttgacgtgaaatttagataaaagccagctcagcagaatcgtgatgataagggtgctgatgatcgcgtaaaacatatagcggttgacctggctgatcatctgctcgacccctctgacgggagacacgagcagcaccgcgcctttaaattgatcgttgataaaaagcggctttgcgacaagcgatacttctaaaccttctgtattaaaacggttcatctccgctctgatctgaacggttttcccttgcttcagcatgtgccactctttacttttcagcttctcgcgcggcggcatatcgtcaggaaaaaagtaaggccgctgatgttcatcgaaaataataaacctggtctcgcgcgtttttaacatgtcctgatacggatacaggcggcgcagatcaagatcgcggccgttcagctcacttgtgatctgctgggcgtaagatgacagctcatccactttattttgatacgcaaaatctttcacaaagtgcgaaaacagggaaatgatgatgaaaaaggccaaaatcaaaatgctgacatgacttaacagcagctgatataagtatttaatcctcatcaaatttgtatcctaccccccacaccgtgtataaaaacggtttttcctcactggacagttttttgcgcagccgtttaatatgaacatcaaccgtacgttcatcgccgtaaaattgatagccccacacctgctcaagcagctgctctctcgaaaaaacctggcgcgggttttgtgcgagataaaagagcagatcgaattccttcggcgtcagattctcgacaggttttccgtgcagaaacacttcccgcgtcttcttattgattgaaaaacacgccgtttcgatcaagtcgtcgcttttaacggcctgccccgtcgcccggtatcttctgatcaccgctttaatccgcgctactagcgtcagcgggctgaacggcttggtgacatagtcgtccgcccccatttcaaacccgatcacctgatcagactccgtgtcctttgcggtcagcataataatcggcacactgctcgtctctcttattttccggcagatcgtcactccgtccatggatggaagcataatgtccagaatgaccaaatcccagtcctcttccgtgaaacgctgatagccttccactccgtcatggacaaattcggcttcaaatccttctttaaaaaagaacatttccgtcatggtgcatacgcttatattgtcttctatcattaatatcttcattggttcctccgcttatcttcacgctttttcttataatagcaccattttacccgggtgttttcgggtttcacaattgttagtttttatttcatcacccggaaatagtttgttcatatttttttcatacatttctcctactatatacatatcggatggccggtgctaaagaaggccggttttacaagatctgacacccacacggaggaacagacatgaactttataaaaagagccttttggagcatgaaggcaaaaaagggaaaaacatttttgcagctggttgtgttttcagtgatttgcatttttgtcctgtccggtcttacgatccagtcagcggcaaagaaatcaagcgaactggcaaggcagcagctcggcgggagcgtcacactccaggctgaccgccaaaagcaaatggcgcagcagcaaaaagacggtgaaaagaggacgtttgaatcaacgccgatttccgtctcagatgccaagaagcttacatctttacagcatgttaaaaattacaacttcctcacgacagcgtcagcaaatgcagaaagctttgacgcgataaaaagctcaggcgaatcagccgataaccgttccggcgccggccgttttcaaggcggcggaagacagatgatttcagctgatatctcgatcgaaggcgtgctctctacggcattgcttgatgatttcacaggcgggagctcaaaaatcactgacggacgcgccatcacaaaaacagatgagaacgcaaaagtcgccgtgattaatgaaacgctggcagatcaaaacaaactgaaggtcggcggctccattaccgtttcctcagcagcggatgattctgtgaaaacgaagcttaaaattgtgggaatctataaaacaacatcatcaggagacgatcaggcacagcatttttcattcttaaatcctgacaataaaatctatacgccttacaccgccgcggcggcgttaaaagggtctgataacaaaaacaaaatcagctcagctgtttattatatggatgatgccaaatatattgactcattcgttgcggctgcgaaaaaaacatctatagatgataaaacctacgcgctgacgacaaatgatcaggtgtatcagcaaatggtcggcccgattgaaaatgtcgcgtcattttctaaaaacgtggtataccttgtatccatcgcgggcgcggtcattctcgggttgatcgtgatgatgtcgatcagggaacgcaagtatgaaatgggtgtcttgatggcgatcggcgaaaagcgctggaagctcatcggacaattcttaacggaaattctggttgtcgccgttattgccatcgggatcgcatccgtcacgggcagccttgtggcgaatcagctcggaaatcagcttctttcccagcaggtcagctcagccgatgattcacagcagcaaacaagcggctggggcggcatgttcggtcagcattcatccggcgcggatgtcatcagtacaatgcaggtaaacgtctcgctgaatgaccttctgattcttggcgggatcggcgtcgcaattgccgtcatcgccacattactgccgtctgtatcagtcatgcggcttcaccctaaaacgatcctgaccaagcaggaataagaggaggcagcataatgagcctattaacctttcaacagaccggctactggtaccaagataaatcacagccgctgtttcaggatataacgatcagctttgaaaaagggaagttttatacaattgccggcgcctccggaacgggaaaaacaacgtttctgtctctggcgggcggccttgacacacctaaagagggaagcatcctttataacggagaagacatctccaaaatcggattaaccaaattcagaaatcaatatgtctctatcgtctttcaatcttatcatctgatcccgtatatgacggcgctccagaatgccacaacggcgatggagatcaccggctctaaggagaacaacaaagatgcgttcgcgctcagcatgctgaaaaaagtcggcatcaccgaacagcaggcccgtcagcgggtgctgacattaagcggcggacagcagcagcgcgtttcaattgcgcgggctttcagctgtgacacggatttgatttgcgcggacgagccgacgggaaatctcgacgaggatacgtcaaaggaaatcgtccggctctttcaggatctggcgcataaagacggcaaatgcgtcatcatggttacgcacgacgaacaaattgccaaagtgtctgatatcaacatccgcttatcaagaggaagtttcacggttaaagaaaacggcacggccgtttcctgataccgcgcccctgccagcgcagacaggggcgcaccctatatccgcctattcaatagaagtgaacgtaaaaagagcgagggctgcatcccctcgctctttttatttatatcagctgtaaataacggccaatatttgattgtccggcggctttgatcaattcttccgccttttcctcttccccaggcaaagcgagccggagtttgtcttcaatgtctttttcagaaagaccgtttcccggcgctcccttcggacagtcgatacgtgtttcatagacatgaccgccggaagccgtgacccgtacaattgtaaaacggcccttcggaacggcgttgtcagccggctgaatttggtcatcgcagctgcggtgaatcagctcaaatcctttttgaagggattccggaatcggctcggatgtgaaatgttcaactgaaaaatccttaccgtgcaaagctaaggtgatcacatattccacgctgaaccgccccgcttcgcctgttttcggacgccgttctgtcaatgcggcgtccccgcccggcggataaatcacgtcgatccgttccgtttggccgaaagtgagaccatgttcggccttcagcttgagaatggcgtccgccgcatgatgagccgccgagcaaaacggataaaccttaaaccaaagtcccgggctcacaatccgccaaggttttccccacccgcttacaagcagggtttctgcccgttcaagatcgccgtacagtccgaaaaaacctttctccccgtcaagcgcatgagctgagccgccgaaaccggcctttgcaagctttacggcgaacaacccggcttgagcggccagtccggcgtggagcggcttcatttctgtcccgaattgcactctcatgcctccggagcgggcagccgcaaacccgatcgccgtctgcaattgggtttgattcagattctccgagaatccgacggcgcatgcggccgcaatggcacctaacgttcctgtattatgccagcctttctcgtaatgatgccttccagctgactcgccgagccgcgccatcacttcgattcccgtcacataagcaccgagaaagcggctcttgtctatccggccggctgatgcggctgcaatcaaagccggaaggatgactgcgctcggatgtcctcttacatcagaatgaacatcatcaaaatcaagcgcatgtgcgatgaatccgttaatgagcgcggattgggacggcgtggttttttgatttctgccgataagcggcgctatcggcaccccgccttcttcttcggccagttttaccagcttttcaactcctttatcccgtctccccgcaaaagctgccgctgtaaaatcaagcagtcctttgcgcgcttctttcatcgcttcagcggatgtttccggcacagacgacatgacggcctgagcaagcccggccgtcagattttccgtattcatttcgtctgctccaatacattgacggcaagccgggcgaaaaactcagccgctgccgggagcgctttttcgtcgagtgtgaaggcgggatggtgccattcttccgttccgtttgttcccatccagacgaagaagccggggattttttcttgatataatgcgaagtcttccccgccgggcgactgttctgcccgaacggtctgaagcccgaggctttcagccgtttgttccgccgcctgtatgaaacgggcgtcgttcatcactgacggaaggtaaggataccagcggaaatcagcctctgccccgaatccggctgcgattccttcggcaacccgcttcatatgtttcggaacagcgtcacgcgcttccttttgaaacgtccggacggtgccttccatttcaacatggtccgggatgacattccaagagctgccgccttgaactcttgtgatgctgacgacagcattataaagcgagctgatatttctgctgacaactgattgcaggccgccgatgatctgtcctgccgcctgaatcggatcaatgctgttatcagggattccggcgtggccgccttttcctttaacagtgatttcaaagcggtcgacactcgccatcagcgggccttctttcagaccgaccgtgccgacggggaggtcaggtttgttatgcatgccgaatatcgccgatacaccgtcaagcgcgccggcttcaatgacctgtcttgctccggcggcgatttcttccgcgggctgaaaaataaaccgcaccgttcctttcagctcatgctttctctcatttaataaaaaagccgtgccgaggatagatgccgtatggaaatcatggccgcaggcgtgcatcacgccgctgttgcgcgaagcaaacggaaggtttgttttctcttcgatcggcagtgcgtcgatgtccgctctgacggcgatgacggggccgcttttgtctcctttgatttcagcgatcactccggtttgaagtttcggcatatcaagaaccgtgattccttcttcctccagccagcggcggattttattcgtcgtttcgtattcctcgcctgacagctcagggtgttcatgaaggtcgcggcggatattgattaaacgtttgtttaatgattcatacgtttcatttgccatttcttcttcttcccttcttagacaagttcggcgggctctcccacttgcttaatgaattttttcgtccgttcgttctgcggattgtcaaacagctcttccggcgttccctgttcgatgatgcgtccgtccgccataaaaataactttgtcggccacttcacgagcaaaagccatctcatgcgtgacgatgatcatggttgtctgtttttcggcaattgatttgatgacttggagcaccccggctacaagctcagggtcaagggccgaagtcggttcatccagtaaaatcgcgtgaggatcaacggccaaggcgcgcgcaatcccgatccgctgctgctgtccgcctgacatcgtaatcgggtagctgtccgctttgtgttctaaaccgacttgccgcaacagatccataccgatctgttccgcttcttttttcggtttcttttgcgcggtgatcagcgcctctgtcacattttgcagggcggttttgtttttgaacaggttgtaattctgaaacaccatcgccgtctgctggcgaagcttatgaacatctttgcgcgaataggacgctgcattcagctttgcatcaccgatttcaatgatgccgtcatccgggcgctccagcagattcaaacaacggaggagcgttgattttcccgagcctgacgggccgatgatggccgtgacttcgccgcttttgatctcaaggtcgatcccgtcaagtacggtaaggtctttaaatgcttttcgaatatgtctgacttgtatcatcctgagcctcctcctatgtgcgataaggcttgctgatcgcccgttcgagcagatcctgcagcacactgtaaataatcgtaagaatccagtacatgaccgcgacggctaaatacgtctcaaaatatttgaggttgcctgatgcgtacatttttccttgggcgaacatttccatcactcctaatgtaaaggcgagcgatgtttcttttaacaggccgataaacgtatttcccgtcgcgggaagcgcgtttctgacagcttgcgggaaaatgattcgtctgtacgcctgggattttgtcattccgacagacagacaggcttcaagctgcccctcatcgactgaattgagcgccgcgcggaagatttcagccaagtaggcggcattcttcaggcttaacccgataatcgccgcagttaacgccgtcatcttgctcattccgggaaacagctgaggcaggccgtaataaattaagaaaagctggacgagcgtcggcacgccccggaaaaatgaaatatacacctttgacagctggtgaagcacaggaacacgattttttgtgataagcgctaatataaggccgccgatcacggcaaataccatggccgcgacggccattagtaatgtgatcggcaaggcttcgattaacgcgggaaaagctgaaaacataaatccccaatcaatgctgttcattctcgattttcaccgccgtttcttaatgctttgcttctgttgtgatatcttctttaaagtacttttcagacagctttttcagcgtgccgtcttttcgcaggtcttcaatggctttgtttacttttttgcggattttatcgtgagccgcatctttcgcaaacgggaaagcgactttttcatagacaatcgggtctcctgctaatttcagaggcagaccggtctttttgatctgggcgatcaggacgctgcggctgtttacataagcgtcaacccgtccgtaagccacgtctttcagcgtgccttcttgtgtttcatacgttttcatattgatttttttatccgggtccttgctctcaaggtttttcgcgtggtttgagcccagaacggccgccactgtttttccttttagatcgttgactgatttgatgtctttgttatcgtttttgacgacgatttgagtgcccgcatacgaatacggttctgtgaagttatacgttttcttgcgttcgtccgtgacagcgacctggttagagatggtgtcgagtttgccggtctggagctctcccatcagaccgctgaattcaagcagcttccagtccagcttcatgttgatttttttcgcgacggcttccatgacatccacgtcaaagccggtcagcttgccgttttctttatatgcgaacggatagctttgtcccgtggcgccgacatgcaatacgttatcgccgccttcgctttcttttccgtttccgcatgctgataagaccgccaaaagcgcggcagacagcagcaaagcccatgttttcttcttcattaaaatcccgccttttcctattaatatgttaatcctgcaattgtttttttaaatagatggtgatgtgcccttttcctaaatccttttcgcctgcacggacgtagccttttcgctcgtacatgccaatcagccacggatgcttgtccgctgtgcccagtgacacgaaaggcgcttttaatgtatcgcggagcactgtattctccagccactccagcatgtctgagcctgtccctttttttccggtttcaggatcgacggcgaaccaccaaatatgagggacaccgtacggcccgggattcggcccccacggcatccgcagagaaatcgtcgccagaatccggccgtcttcctccaaaacgtaacaggcgtttttttgtatgttattcaaaacgagttctttatccgccgtggcagcggcaaaattgatgccgagctttcggatcggttcatacgcccgcagtgtcagtgaaagcagctcatcagcgtctgcctccgttgcgagccggtattgtcttgacatgataagccctccttcagtcggcatatcggtttgccggtttttccagtccgaaatgttctctcagcgtcgttccttcatactcttttctgaacacgccccgttcttgtaatatcggaatcactttgtctacaaaaagagtgagaccttcaggcaaaagcggcggcatgatgttgaaaccgtcacaagcttgttttccgacccattcttccatcttatcggcaagctgttctggcgttccgacaaagatatgatggcctcttgaacccgccacatatttgtacagctcgcggatggtcatgttatcgcgtttggccatctcctgaacgagcttgaagcggcttttaacggcattcgacgcatccgcatccaattcaggcagcgggccgtcaagcgggcaggcggaaaggtcgacgccgcccagatagttttgcagaatgttcaggccgatagacggaatgatgaggtcttggagctcttcatattttgcctgcgcttcttcttcggtatcagcgataacgggaaaaattcccggcatgatcgcgattttttcaggatcacggccgaaagaagccgcctgttctttaatagattgatagaattcctgcgcggattccaaatgattttgcgcggtgaaaatgacctccgccgttttggcggccagcgcttttccgtctcctgatgatccggcctgaataatgaccgggcgcccttgaggtgtgcgggcgacatttaacggccctctcacggagaaatatgttcctttatggttcaattcatgcattttgtctttatcgaaaaatgctcctgattctttgtcacggataaaggcgtcttcctcccacgaatcccataatcctttgacgacttcaacgaattcttccgcgcgctgatatctgaggctgtgctcaagatgcttttcgccgctgaaattaagcgcggtcgattcaatcgaagatgtgacgacattccagcccgcgcggccgttggaaagatggtcaagcgatgcaaattgtctcgcgatatggaacggttcgctgtatgtggtagacgcggtcgccgtcaggccgatgcgggatgtgacctgagcgagcgccgacagcagcgtaaacggctcaaagcgcgtcagcacattcggatgtgatttgccgtctattgataaactgtccgccaaaaacagcatgtccaatttcccccgctcagccgttttcgccagttctttgaaataatccaaattcatgctcgcgtccgccggtgcctgaggatgtctccaagaagcgacatgatggccggtgcccgcgagaaacacaccgagtttgatttcttttttctttgtcatgatggatctccttctattctgaaatacggttcggaaaatattaacacgattaaacctatatttcctagtaattttataagaataaatcaaaatgtacaattgtcacgcaagtttgtcaatgcattaagacaaaaatcatgatttttaaaataacccggcgcaccggccgggttatttcttcgaaactgtatagacggtccctttgacctttttcttaataacggcaatgataagcagcaaaacggggaacagcacttgaaacggaagatgaatatagatcggcacaatgtttaagccttcattcatatgttccgaaaaattgcttgcgatgctgatggagagaatcagcacccccaatccgaccgggaaggccagctgggacggatttttttctttaaacagcgtggacacgcccacgacaaccgcatatgtaaaaaggctgactttgaaaaaaccgccgatgacgagaacgagcatgaaaaagacatccagccggtctaaaaactcttccactttaattgtctgtatggtgctcagcagcggaaattgagagcggagcattaagttgacgtccagcacacaaatattaattgccactgacatcgccaaaaacaggccgctgatgataatcgccagaaatccggttttcttcacctttttccgatcttttaaataagggaaaatcatcacaaacacgattaattcaccgaacgggatgaacatcgtctgtctaaacacggaataaatgaccgttcctgcaccctccgctaaaacgggctggagaaatctgaggtttatcgtgcctgagctgataatgaggatcagcccgacggctgtcaggaaatacataatgccaaacagcagctcgccggctctcgctatcacttcaattccctttctgaccgcaaatatcgcggcgatcatcagcatggcattcacaattaaaagcggcgtgtcctggtaggcgaaggtgacaagcatttcgccaaaatcccgcaatacgcgggcggcgatataagcaaaatagagaatataaagaagggagaccgcccagctcagatgtctgccgatcagttcgttcatgtaatctctcggagaagactcaggaaaaaattgatacagcgcctgataaacgtagaaaagtccgagaccgataacgcacccgagaagcacggacagccacgcatcccgcccggccatcgtgcccggcgggatcaataacgaactgcccaattcaaacaaaatgatcataataaacagctgacgcgtgccgattttcgcattttccatacgcttcgctcctttctcctcaaatcaatcatgctcaagcttgtctgagagaggattattccgcaagcccgttcttctgataatgacttccgttttgacatctacggggagattggggaaatattcttcatcccacttccctttgaactttttccatttgtccgggtgcttccgatagatcaggtctccgaagccgacgaagtcattcttatgggcttttatatcttcaatcgatttggtgatatctttctcaagctgcacgctgagcgccttttgcatggtcatcagcacttgcggatcagacagatggaaagggtatctgatagcgtccaccagcccttcgacctgagcatgcacgtgaatatgcggttttccgttcggaaaagtggccgtcacctttgtattctggcgggtgacctgcagactgattgcatgcttcacgttcttccaatccgcattgatgaacgtatgcttgatcctattgagcagccatacagcccccacactgtcgttatcctcaatccagtaatccagcctcccatcctttttgaacaccgccagtccgtccgctgacagcactgctttcggttcagttgtctgcgtattttccatcgtaggaccggctttatcgtctccgtgcatttcataacccggaataaacggcgacccggccggagaagcgagatcaatcagaacgtcctgaaggttggttttaatgactctgccgtattgttcctgcgtgaagctgagcgtcttgttcactttattggaagggattttatcaatcggagtcagcactttaataatgtcttcagccttgcaattatgcgcgatcacaacggttgcggtcgtcctgaattcggtgtcgcggtcaagattgtccagaataaaactgagcccttcctctttcgccagtttttcactgaacaccacgagattcgtatgcgcaaaatagagccttctggacactttcatcgagccttttctcaaagcttccgtcatattgtctccggacaccgaatagacggaaaccggaggccggtctcccgctccgccgccctgcagaccgccggccacgtttcccggattgataatttgcaagtgaaggacgtattttcccgtttcggtccggtcaataccgatggcggagatcaccgctaaatcggtcagctcccttttatcccagcatccggatacaaacataagggaaaccatcgtacaaaggataagcatccatttacgtcttttcattaccgtcgccctcttctacatctttattaaccattcctctggatgtctccggtttcggtctttgatgttccccctggcgcctgttgttttcctgcacgagcagtcccggccttttttcatccgcccataacggggcgcggaggagggaatctttcagcccgcccggggttaaaggagcgagcggggacatatacggaaatccgaatgaacgcaggccgcacagatggacaaacatcatgataatgcccagaatcagcccgtaaaatcccatgaccgccgccgacagaataaagagaaaccggatcagccgcgcagatatcgccatgtcaaaagccggggtcgcaaagctggcaatcgccgtcagggcgacgacgataaccatggctggggaaacaatgccggcctgtacggcggcctggccgatgacaagcgctccgactatggaaacggcggagccgacaactctcggaagccggacacccgcttccctgagaatctcaaaggccacttccatcgtcagcgcttcaatcacggccgggaacggcaccgtctcccgctgggccgcgatgacaatcagcagctgcgtcggaatcatttcctggtgaaaggtcgtcgccgccacataaatccccggcgccaccagtgaaatgaagaagatcaaaacccgcagcaccctgatgctagtggcgatatcaaatcgtgaataataatcctcaacagattgaaaaaattgaataaataaggccggcgcgatgagaacgaacggcgttccgtccacgataatcgcaaatcgtccttccagcagattccccgccacaacgtccggccgctccgtatgatatacggtgggaaacacagaaaacggcgcgtcttcaatgagctgttcaatgtagccggattccagaatgctgtcgatgtcaatgtgcttcagccgcttgcggacttccttaatcagctttttatcgcaaattccgttaatatacatcagcgcgacatccgtattcgtttcgtgtccgatctccattttttcaacccatacatcaggcgtttttacatacctgcggatcatggaaatattggtttgcagagattcagtgaatccctgccgcgggccgcggaaagagacctgagtgctcggctcttgaatggaccggtgctctcccccttccgtgctggcgatcagcgccttgtcagccccgtcgacaaaaatgagcgtgctgcccgccaccagcccggcataaagacttttccatttttcttcctctttcaccccgccgatcgcaagcgttttatcgtatatcaggcagaccgcttgttccggctgaacggacgggatgtcgattaaatcctccagaagggattgactgacgagctgttcgtctaccaaaccggcgatatacacaattgcggccggaagctcttcttttccgattttcagccggcggatgacgacatcggcactgttgccgaacctcccagacagcttcttcatattttgctttaagctgagggagatcggctcatcccgctctttgtccggctggctgtccgcttcttttctgccttcattgtcacggtcgttttgatcggcttttttttgtttcttctgcttaaaaaatggcggcatatcgcaaaaaacctttcctcgtttttttcatattcttcctgtacggcaaaagattatgcacggcggaaagtctgtataagttctgtgtaatcgaaaaggataaaaagggagagtgatgcgcatgaaaatattgggggtttcattttttttgctggctgcctgtctgatcatttcagtaacgatagatatgctgcaaggtttcagtttctatggagcggtccaaaacaacctgtccgcttttaaattgaccaccttctcagaatggctgatgctgtttttattcgccctctttttaatcagagaaatgatcgttttatataaatcaggtaaaaaagatgcctgacaggcgcacggctgtattgtgtcaaaaaagaacacatccctccttctttcggagttcatgtgttctttttatttttccgatgcagattgttttcagatgacgatatttccgctgtccgtatctgtcgcgtgtttcacaatgacgcctttgataatgcggttgccgatgattttagtacttgcggaggatttggtttggatggcggaagcagaagcggcggaaaggttgttgatggtatttcccgacacgagggaatttgaggatccgttcagatagatgccgatcgggctgcccgccgttcggttgatcgtgagcgtattgtctatgacttcatgcgtgcctgaattcagatacacggtaacgataagcggtgatgattcaaaacggttgctgatgacagaggttcccgaggatgttgaactgaaaatgggatagtttttgtagcttttgaagagatttcccttgatgacagccctggcgtcatttgtcacagatacggcataggactccgcgacgccctgatacgcattcggaatcagcgtatttccttcaataacggcatttccgcctgtgacccatatgccccggctgaacgatttcagcacattttgttttacggtgatattgccggccgacatgctgattccgtccgttacctgattcagagtattattcataaagacggcgttttccgacagcgtcgcccgcatccccgtgcttcgtctcgtttcggaacgtccgttttcaatgacattgccgtcaacggtcacatcttccgcctgatagacggaaatgcccgtattttcaaattgactgattttgttatgggtgacgaggacgctttttccccttacatctactccggtggaaaaaccggtaatcagattgttggaaatgacggcattgctgctgtcctgtccctgtgacacaccttgtccggcgactgcggtccttgagccgccgtctgaccgaaagaagatattccccgaaatgacggtatgtgccccatacccgtagctgattgtgttatcggaatgatttccttcaattaacacattatatccgttaaagttggtgactgagcttgcggcgtttccggaaaagaagttgttgcggaccgtaatatgaagagcttcttcataatcaatatcgccttctccgtacgattcaatatcgattccgaatttcggagccgttccgttcccttgcccggcgtcttcaatcacgcattcttctaccgtaacggtattgcagccggtgattgaaatgttgtttcgccttgactgcctgatctcacagcggcggatggtcacctgttctgaagtttcgtaatcactgtttgtttttaacccgagcgggctgacaataatgccgtctcccgtaaaatccgaaatcttcacattttcgatcagcacattgctgctgccttcaatacagattccaaacccccattcatgggtcgaacgcaaagggacattggtatacgtgtgttcatcccgttcgccgatgatccggccgccggtgatggtgacattttcccgcctgcctatatagaaagccgagtagccccaggagctgttcggcgccactttaatcgtgcattccggatctaaaacgatggtgagatggctcggcacgttaatcccggcgttccgaaacggctggctgctgtccccgccaagcgtgccgttgattttataggttcccggcggaaaaaacaccgtatgacagccttcgctgacggccttggccaagcattggttgatggcgcccgtcacatcggtttttccgtctgccgccacaccgcaatccgtaatatccaatatacgattcggcaagtgataatctcctccttcctctcttattgtcatcttattccgccatatcccgctccgcctgtacatactttaaattttattaaaaaagtttataaagatagtttagtcagataatataacaaaataagtcattggaattaggagaattcgtctatattcaacgttttaatatcttttcattctggaattttttgaattcagtataaattatattgacacaagtattatataagaatatgatttttgtaatacacttttttaagaaagggttggctcaggtggcatctattgataaggactctataacagaaactgtgccgcaacgaggctttttcggtcatccccgcggcttgtttacactgtttttcaccgaattttgggagcgtttctcctactatggtatgagagccatattgctttactatttatacacggaagtcgctcatggcggtctcggctttgataaaacgaccgcagttgccatcatgtccatatacggatctctcgtatacatgtcgagcgtcatcggcggatggctggccgaccgggtattcggcacggcaaacaccgtattttacggcggaattttaattatgttcgggcacatcgctcttgccttccctggcagcacggcagcgttttttaccagcatggctctgatcattatcggaaccggcctgcttaaaccaaacgtatccagcgttgtcggagatttatatacgaaggaagacgagcgccgcgactcaggtttcagcatcttttacatggggatcaacctcggcggattgcttgcgccgctaattgtcggaacactcggacagaagtacaactaccacttaggcttcggatgcgccgcggccggtatgttcctcggactgattgttttcgctcttacgagaaagaaatacctcggcaaagcaggctccaatgtaccgaatccgatttctaaatcatcagtgatcggcacgggaatcggagtggtcatcgcagcagccgttattatcgttctgattcaaaccggctggctgacgatccagcgtgtgattgacaccgtcagtatcctcggcattgtcattccggttatttactttatcgtgatgttcacgagcaaaaaagcgacgaaaacggaaaaatcacggcttgcggcttatgttccgctgtttattgcagcggcaatgttctgggcgattcaggagcagggcgcgacgattcttgctttatatgcggatcagcgcacgagactttcctttgcaggcatgcatcttgagtcttcatggttccagtctctgaacccattattcatcgttattttcgcgccggtgttcgcctggatctggatgaagctcggcaaacgccagccttcaacaccgattaaattcgcgatcggcattatccttgccggattatcatttttagtcatggtgcttccggttatgggcggaagcggcgagcttgtgagcccgctttggcttgtgctcagcttccttttggttgtgcttggtgagctttgcctttcaccggtcggtttatccgtcacaacgaaacttgcgcctgccgctttctcagcgcagacgatgagtatgtggtttttaacaaacgcctgcggtcaagccctgaacgcaaaagtagtcggtttgtttgataagatttctgaagcggcctacttcggctcaatcggtcttgtttcgatcattctcggtattattttgattcttctgtctcccgtcattaaacgggcgatgaaaggcgttcaataacagataaagaaaagcctgcggaatcgtccgcaggcttttttgatgcgtctattgttttaactcctcaagtgtttctctccatctcttcaagacatcttccggttcgtggagctggatggccggtccggatgtcagatccgcgtatttcgcccgatcttccttgacggtgatcacccggcagctgaaccgttcccgctcgtgtttcgcctctttcagcggcggaagcgcctcacattccaatgtgacgtaatatgcggctcctccgtgccaggcgatgaaaagagcttgtcccgaatgcagaaggctgcttacggtcgtcgtgtttttccataaggcgagccggagatttgttctgctcacggccacgatttcaccggcgctgatcatggccgcgtgcggacggccttcttttgtcacggattggagcacaaatgcgtcgtgctgctttttttcaagctccgtcccgtctaaaagtgtgtaaagcgcctccggcaagtgctccgtcagcattacgcttttctttccggaacagcgggaacatgtgcggccgtctccgtttctttcggatcgattttaaatgccgggttgaatgccgccggattcgtgatgctttccggttcacaggatctccatgtgaaaaagcaggtttggcattggtaaatttcccaagcgcctttgaccggcgattggctgacggtttctccttttttcgattcacagcgcgggcatgttttcattgcaacctcatcctttcttattgattcattaagtccatcagtttttgttcccattctttcgttgtcagcggagaatcaagcggctgagaataatggcctcttgtttccggcgcggcgggcgtcgtggcgtcaagaatcattttgtgtgtcatccctgccggatcagaccccgggtcaagcggaaggacggacaggtcaggaatgatgactgcatcgtgtttcggatgcattttcgttgagagcgcccacatgacttgcggcaggttaaacggatcgacatcctcatccacgacaatgaccattttgcagtagccgagtccgtgcggcgtggtcagggcgcgcatgccgaccgccttggcaaatccgccgtagcgcgttttcgttgaaatgatggcgatcaggccgtgcgtatacatcgcattcacggcgacaatttcgttcggataagcttccttgagctgctggtaaagcggcacgcacgtattaatgccgatcatataatcgcactccgtccacggcatgcctaagtataaatgttcaaaaatcggattgtttctatgatatacccgtttgattttgatcaccggcatgctgcggccgccggaataatggcccgtgaactcaccgaaaggcccttcgtattcccgttctcccgcaaggatctctccttccagaacgacttcagcgccccaagggatgtctaaatcagacaatttagatttgacgattctgtagggctccccttgaatcgcgccggccatttcatactcggattgatcgtataacagcggagttgacgcagctgtcgtaatcaccggctcacagccgagcgcgatcgtaacgggaagattcacgccgcgttcttcagctaggcgaagatgaatcgcaatatcatgctgaggcacgggctgaatgccgaggcggtcttttccctttacctgcattctgtaaatgccgacattctgcttgccgaaattgtccggatcttcaagatcgcgggaaatgacgcacgctttatccaaataatagccgccgtccccctggttgattctgaatagcggaaggatgtcaaatagattgatatcttccgttatttcattttcatgaaacggcgcggtttcttcccgtttgaccggcaccggaaatgcatcgtaccgtttggcgaactcaaagaattgttctttaacaggcgtatctttcggcatgccgagcatcattgcgtgattcggccacgagccgatgacattcagagccacctgcgcatggtgatgtccgtaaatattgttaaacaaaagcgcaggggttttatccccgagattgctggctgcacgcgcagcggcgcccagatccggctccggttttacctcttcgttgactgttaagagctgcccttctttttcaagagcggcgagaaattccctaaaatcctgataggccattatcagattcctcctttttgtttttcaattccgtaccaccgtttcgcttccggcagacggatgccgaactgatcgagcgtccggaacacaatatggtcgatcaattcatccatgtcagccggcttgttataaaatgccggcatcggcggaagaatgacggaacccatttttgtaagcgctagcatattttctaaatggatttggctgagcggcgtttctctagtcagcagcacaagttttttccgctccttcaggatgacgtcagccgcccttgtcagcagattgtcagccattccggtgcggatgcttgccagtgatttcatgctgcacggagcgatgatcatcccgtccgtttcaaacgaaccgcttgaaatcgccgcggcttggtctttgtgagaatacgtataggatgcgagtttctcgacatcttttaacgtataatcggtttcatgtgtaatggtgacatttgcccaaggagacacgacaagatgggtttcgatctccgcggcttttaaatattctaaaagcctgatcccgaatatggctcccgttgccccggtcattccgatgacgagcttcatattgacccctcctttacgcttgaaatgtggtgtcaaaaccatcatactcctgatatatccatatgaaaaatattcgttaaatctatgtatcataccttaaaggtataaaagaaaggagcgagcgttctcatggatatccggcaattgcgttatttcatcaccattgcccaagagcagaaaatcacgacggccgccaaaaagcttcatatggcacagccgcctttaagcagacagctgaaacagctcgaagaagaattgggcgtcattctgtttgaccgcaataaaaagaaacacatgacccttacatatgaaggaaatgtctttttgaaaagagcgaaagagattcttcataagtttgaggatgccattatcgaggtacaagagctgaaggaggaggtggccgggacacttgccgtcgggtcaaccatttactgcgccgcgctcatgcttgagaaagtgtcacagatgaaagagcggtttccgcatctcacctttaacatttgggaagatgagcctgtctcactgctcgagcttctggaaacccggcagattgacgccgccgtcaccaccaccttgattaaaaacgacggcattgaatcgaaggagcttgaagacattccgtgtgtattggtgctgtccgagcattcaaaacgactgtgcggtgaaacgattaaactgaatgacatcgcctctttgcctttgatccttttgcgcaccgtcaatggaagaggtgtgtatgaccaagtcctccaagtttgtgaacagtacggtctcgaccttcaggttgtctgtgaatgccatgactccgcgacgctcttgagcctcgtatcatcagggttcggcgccacaattctgcctttgacgatgattcccgtccatatgcgctcgcatgtcaaaacggttatcatcgaagacaacccgtttgtcatgacaccggccgtcatctggagaaaagacagctatctgccgaagccggtcagacagtttttggaattgttttgatccggaacacgaagaattcccgcttatgaaaaccaattacttgactcatactaaaaaaaagttatcctttacaattgggagctattttttctcaataaaactactcagaaaagtggggaataaagaagatgaaaaaagcattattcgctttgttcatgatggtcagcatcgcaatgcttgcagcctgcggaaactcacaggacagcggatctaagtcaaaagacggcgatctttgggcttctgtcaagaaaaaaggcgtactgaccgtcggcacagaaggaacgtacgaaccgtttaccttccatgataaaaagagtgacaaactgaccgggtatgatgttgaagtgattcaagaagtcgcgaaacgcctcggtctgaaagctgacttcaaagaaacacaatgggacagcatgtttgccggattaaacgcgaaacggtttgacgtcgttgccaaccaagtcggcaaaacaggccgtgagaaccaatatgatttttcggataaatacacaacgtcaaatgcagtcgtcgtgacgaaaaaagacagcacgattgcgaaagaggctgatgtcaaaggaaaaacagcggctcagtcattaacaagcaattacaataaattagcgaaagaagccggcgcgaaaattgaaggcgttgaaggcatggctcaatcccttcagctcattcagcagggccgcgctgatctgacttacaacgataagcttgccgtactgaactacttaaaaacgtccggcaataaaaacgtgaaaatcgcgtttgaagcaggccagccgcagcagacgtatttcgcattccgaaaaggaagcggcgaacttgtgactcacgtcaacaaggcgttaaaagaaatgaaagaggacgggactctttctaaaatagcgaaaaaatggttcggcgaagatgtttctaagtaacatgccggaacccgtgattgcaacagccattccttgggatctggtgcagcagtcattctggccgattctttccgggggaatctattactcgattccccttaccattctttcctttattttcggaatgatcatcgcgctgattacggcgctcgccagaatgtcaaatatgaaaccattgagatgggtgttcagcgtatacgtatcagcggtgcgcggcactcctcttctcgttcaattgttcatcattttttatctgttcccgacatttaatattacgctggaccctttcccaagcgcagtcatcgcgttttcattaaacgtgggcgcctacgcttctgaaatcatccgggcatctatttcatccgtgccgaaagggcaatgggaagccggttatacgatcggcatgacctatcgcaagacattgttccgcgtgatcctgccgcaggcgtttcgcgtgtccattccgccattatcaaatacatttatcagcctgatcaaggatacatctctcgcgtcacagattctcgtcgcggagctgttcagaaaagcgcaggaaatcggcgcgcaaaaccttgatcaaatcttggtcatctatattgaagccgcctttatttattggatcatctgcttcttgctgtcaatcgtacagcacgtgatcgaacggcgtctcgaccgttatgtggccaaataaggaggtttcgatatgctttccgtcaaaggattaaataaatcattcggacagaatgaaattttaaaaaagatagatatggagatagaaaaagggaaagtcatcgccgttctggggccgtccggttcaggaaaaacgacgcttctgcgctgtctgaacgcgcttgagatccccaatcgcggcgagctggcattctccgatttttcaatagatttctccaaaaaagtgaagcaggctgatattcttcgcctccgccgcaaatcaggcatggtctttcaggcgtatcatctgtttcctcaccgcacggcgcttgaaaacgtcatggaaggacccgttcaagtgcaaaagcgcgacaaggagcaagtcagaaaagaagcgatggaacttctggaaaaagtcggactcaaagacaaaatggatttatatccgttccagctttccggcggtcagcagcagcgggtcggcatcgcccgcgcgcttgcgattcagcccgagctgatgctgtttgacgaaccgacgtcagcgcttgatccggagctggtcggcgaggtgctcaaagtgattaaggatttggcgaacgagggctggacgatggtcgtcgtcacccatgaaatcaaattcgcgcaggaagtggccgatgaagtcatcttcattgacggcggcgtcattgtggaacaaggaccgccggcccacattttttccgcgccgaaagaagaacgcacgcagcggtttttaaatcgtatactgaatcctttgtaggaacgggagaagaagcgaaacactgatttcgcttcttcttttttttggcggttatgctacaatgacaattaatgaaattttatgaaagaagggacctctttgaagcgggaattcttgatgcgctggacgttttattttgccggtctgttgattttgtctttcggggtatcgttaaccattaaaggaaaagctctcggcatcagcccttgggatgcctttcattatgggctttttcagcatttcggactttctgtcggccaatggtccatcgtggtcggcgcggtcatcgtggctttaacctgcctgttcacgaggacactcccgaaaatcggcgctatcttaaacatggtgctgatgggaatgtttattgatttcttttcgtttctgcttcctgagacgcacgctttttccttagcggccgtgtttttttctattggattgctgctgatcggctgcggcgtcggtatttacgtatcagcagggctcggcgcgggcccccgggactctctgatgatgctgatatctgaaaaaacaggctggaacgtgcaatgggtgcggaacggcattgagctgacgattcttgctgcagcctggatgatgggcggacctatcggtgccggaaccattattacggctgttttgacggggctgattctgcgtttttctttgccgcagtcctctaaactgttaacatacgcgatctccgggcgggcaacgtccgttcattaaaaacaaagccgaaacggttttgtttttttattttcggacagctttcgtcagatatgataggatggttttgacaatattttcagacggaggatctggacatgaagatttacggagtatatatggaccgcccgctttctgcaggggaagaggatcggatgatggcggccgtgtccgccgaaaagcgggaaaaatgccggcgcttttaccataaggaggatgctcaccgcaccttgatcggcgacatgctgatccgcaccgctgcggcgaaggcttacggacttgatccggccgggatttcattcggcgtccaggaatacggaaagccgtacatccccgcgcttccggacatgcactttaatatttcccactccggtcgctggatcgtgtgcgctgttgattcaaaaccgatcggcattgatattgaaaaaatgaagaccggcacgattgatatcgccaaacggtttttttcgccgacggaatacagtgatctgcaagcgaaacaccccgatcagcagaccgattatttttaccatctgtggtcgatgaaagagagctttatcaaacaggccggaaaagggctttccctgccgcttgattcattcagcgtccgccttaaagacgacggccatgtgtccattgagctcccggacggacatgaaccttgtttcatccgcacatatgaggcggacgaggattataagctggccgtttgtgcggcgcatcccgatttttgtgacgggattgagatgaaaacgtatgaagagctgttataagcaatccgtcagcattttgatgcctcgcgtgatatcccctgtcttgacgttggacacgttgagtttgatgatattttctttcggaaaatccgataggtaatggctctcaatcggctccaccagcacgccttgcgctttcagacgctgcacaactcttgaagcggaaaggcttttctccagcacgagatgggtatggatcgacgtttgctttacagaaaaaccgccgtactcctgtagcgcgttttggagcagctcggaacgtgctctgtaagaggcccggattttttctttatgccttttgaacatgccgcttttgatatacacttcaagggccgcttgggatatcatcgaacagtcgatatcgctcagctttttatacgtatggaaaaccggggccagcgaatccgggagcacagccgctccaacacgcagccccggaaaaatcattttcgaaaagcttttcaaataaatcacgcgggaagacagatcgtaggcgtacagcgggtctgccttctgattgtcctctaaatctcctaggaaatcatcctcaaccaaataaacgtcatacacctccgctaatcggacaagctctcgtttttgccattctgtcagagagctgccgagcggattatgaaatcggggcatcgtgtaaaaaaacttaatttcctccgtctgaaacagccgctcgacttccgccatatcaagcccctcagccgtccgtttaatgccgcaggcgggaaggcgcagcgcttcaagctgctccaccatcagatgatagcccggctgttcgattaaaatcttcttttttccgttcggaaacggcatcagagacagcagggataacgcctgctgcacacccgaggtgataaaaatgttccgctcttttgcaaatacctgataatcggataacagcgtctgaagcacccggattaaagacggaagcccctgcggcgtgccgtaaatgaacaaatcatttttatacatatcaatggctttgttgatgcaatgctgaaagtcgcggtacggaaaaatatcagggtccggcgccgaggctgcaaaatcaatgatacctgtttgttctcgctcctgctttttttcatttttaataagatagtagccgcttttcggcacggcataaataatgtgccgtttttcaagctcctgaagcgcacggatgacggtgcttttactgacgtgaaaacgctcggccagctgcctgatagaaggcagccgcgccccttcctgaaaagtgccgccttcaatgagactctccacttctatcatcacgttcatatacttttccatgctgaacctccatctgtaccggtacagtttatcattattctcattgtactgcttcttcccttcccatacaataaaagggagcggccggcgctcgatctcattaaaggagttcgtaaagatgattaatcaaaaccgtttggctgctgcttacctcgctgccattttaaatgcgctgattatcggtttttcctttatatttgtcaagattgcgcttcaatccgccaatccgtttgatatattggctcatcggttcacagcggccttcatctgtgcaatgcttcctgttttattcggctggatcaaactgtccgtcagctggaagaatgtgctggcgatcttgcctttggcccttttatatccggctttgtttttcagttttcaggcgttcggccttttgtattcttcatcatcggaagccggtatcattcaagccgccatcccgatttttacgatgctgttttcgtcttactttttaaaggaacgtccgacatgggcgcaaaagggattcacatgcctgtcagtggccggggtggtatttattttcacaatgaaaggggtgtccgcggaatcggcgagttttaaaggtgctttcctgatcctgttgtccgcgctgtcctccgccctttacaatacggcagcgagacgcatgacccagcgtttttcattgggtgagctgacctggtgcatgtctgcgatcggctttgcttccttcaactgcatcgctctcttccggcacggagcggaaggaacgatcgggcagtattttctgcccttccgcgatcccggttttatcgcagcgattctgtatttaggcattttgtcttctctcattacatcattgatgtcaaactacgcgctgtccaagattgaagcgtttaagatgagcgcctttaacaatttgtccgtcatcgtgacgatgcttgcgggtgtcctcgttctccatgagtcactccgctggtatcatatcgccggcgccgtctgtatcgtcatcggagtcttgggaagcaatgcttcaggacggcggaaaaaaagcatattacgacatagggaaaaaatgaaaggaaacgaagacggaatatgatcaacacacgaaatgaaaatatctatctcgcgggctgcttaacatttgccgatgtaagaaaacactttgcttatcatcaaggaaaatccgcggctgtctgttttttgattatgctgctggcttctgccatctgttttgaaatgaacggcccggttacaggcggcacatggggcgtcagagctctcctgaatttccttgcagctgtgattctctctttggcagtcacggtgatcgcaacggcaatctcattcttccgtctttacagaacatacaaaacgaatcagcggctgaaatctgccagaagtattacgattcatcagctcggaatcagccaaaaacaaaaaaacgcaagcattctttttgaatgggatgaactgctctcggctagggagcacaaagatatgtttcgattacaaacatcgggttacggaacacttctgcttccgaaacgacttttctattcgcaaaaagatatcgccgttttcaggcaaatgctccgggaaaatgtgaatgggaaagtaaatgtaacagaataaaagacaaaaaggagggtgtccccctccttttttgtcagcctgatatttccgcctgtttctgcagctgctttgcttcctgataaatttcttcgaacagatccgcgatgtgttcttcttcaacacatgaaaatgcgattcgcaaatcggtttcattaatggatatcgtcccgattcctctcttttcaagcaacgatactctcaattcgccggcgtttatgtctttcagccggacacacatgaaataacccgagttaaacggataaggcgtccatacgtcttcatagtgcttgttttctgcaagaacggctttcactttgtcagcccgttttttcatgatgttatatttcagcgatttttctttctcgtattccggtgactgcatcgcccgcagcataaacgtttgggacgggtgcggggcgcttgaaatcgttcccctgataatcccttttgttttttcctcgagcacgcgcagcgctttttcgctttttgtgctgtacgtaataaaaccgacgcggaagccccacgcgtaattttccttcgtcgcgccgtctattttcacgcaaagcacccggtcgtgcacttgggcgagtttgctgaagatggattcctgaatggccgtttcatcgtaaaacagattgtaatacgcatcgtctacgagcacgacaatctctttgccggcttctgccgcctccaggatcacgctgacgatttctgacgcttcctcttctcccggcgtgtagcctgtcggattattcgggaaattcagcacgacaatcgccttttcttcctgctttttcagcagctcggacagccccgccgcattaaaacgcccatcctgctgaaaaagcgggtaggtctcaatggatgccttgcgccggacaccgaaaatgaaattgtaatttccccaatatttatcaggcagaagcagcgtatccccttcattgacgaacaagtcggcggcaatgctcagcccgtgtgttaaagcgtttgtcacgatcggcgtgctgatgtctttgccggctaatgaaggattttcgagacgcatttttttcagccattcctgtctgagcggctcttttccctgcggcggagcataatcgtagatatcatcggggttataggcggacagtgtctcttgaatatgggaaaagtgcatggactcgccctgtgaggtggcaatcccgatcgtggcattatactttccggccttggctttcgcttccgccgattgtgtcagcacccctttcggataaaacaactctctgcccaaatcagaaagcatatgaagcacgtgcgggttttcttcagataatgttctgttcagctcttttgctgcatcattcatgtacgacaatcccttcaaaattatattccatcaaatcataacataaaatttttgataaatgagaaaactcgcgggcggattttgttacaaaaaacagacagcgaatgctgtctgtcatatcctataacaattggcctgcagtgctcctgttaataatctcatagattcgttccgccactttttcagtttcacttaatatgaacatgtggccgtccgaaaactcatgaaatacgggattgtcggcccattttttccatccgtccgcatctttgatacattttttatctttccgcccgttaaatatatggacgggtgattgaatgatgtgagaatcagacggacggaagctttcaagcgcgcggtagtcggatctgaaagaaggcaggaaaaatgacatgacctccttattctccactaactcctgcggcattccgccaagctcgataatatgggcgagaaatttttcatcatcaagatgagacacttttttcctttcaacatgcggcggctgaatggctgagatgatcacggcctgcgggtaaatgccctcccgctccagcttttgcgccagcctgaaagcgaccatgcctcccatactgtggccgaacagcacaaacgggcggtcgggatggagattcaactcctgcttgtataaactgacaagctgttcaaaatcctcaacggcggacatttgatttgttccgtgtcccggcggttccgcggcaagcatctcacactcaccttgaagataggtgtggagcgggcggaatgatgcggaatagcctcctgcgaacggaaaacagataagctgcgttttttccgtggtatcgaacgatttaaagagctggaccattggcgggcttcctccttttctatcgtgaagttgtcagcttcagatgttccttccttaggaattcgagcaaatatgccgcattcctttcgagacattctccctgaagcatttctgcgtgagtaccgcagccttttttcacacggtattcacctgtcgtggcttcctcccacgaagcgagccacggcggcatcgcaaagtccggttctgacgttaatagatctatatccgctttgaccctgccggtgctgacggtatgcacaaaataagaataaaacgcgtttgtttttttggcgagaccttctttgacggcttcgttattcagcgcttcattgtcccggtttaccttcatcagcgcctggacatcactttctacggtgcggccttccaagtcgctgacgccttgttttttataggaatcaaccatgatcagccgctccactttacggccttcggcttcaagccgtttggccgtttcaaaggcgagcgtgcagcctgccgagtatccgaacagcttgaccggtccttccggctggagctgattgatcagctctgtgtagcgttcgatgcggttgtcttcctcgataaaatcaaacgcacagattttatagccggacagctgttttgccagcggctggtacatcagcccgtaaccgagaaccggcgggaacgcaaacagtgtgtcagactgatttttattcatgatggtgagatctttcattcctttttcttcaccgtgaagcagataaccggcaatgtctgcgattgtcgtcgcttcgaataacagctgcaccggaatgtccgtaccgagctcttttttaatgcgcgacgctgccgtcatcgcttttaaggaatggcctccgagcgcgaagaaatcatcatgaatcccgatctgctgtctgccgaggatgtcggaccagatatgtgcaatcgtttcttccgtcgcgtttcgaggcccgatccattctttcgccgcctgagcctgatccggtttcggcagctgccgtttattgaccttcccgtttgtcgttaacggaagctcctctaagaaagtaaaggtttgcggcaccatgtaagcaggaagctgttttttcaggtgcctctttacgtcttcagctgaaagcggcgtccggttcacgaggtaggcgttgattgatgcatctccagactcatggcggtccgcaacaacgaccgcatctttcacacccgggtattcctgcagctgcttttcgatttcttcaagctcaatccggtgtccgcgtattttgacctggtcgtcaatacgcccggcgtattcaattgttccatccggcagccagcgtgctaaatcccctgtgcggtaaagcatttctcccggcttgaatggatttgggataaacgtttgcttcgtcaggtcatgacggttcagatacccttttgatacacccattccgctgatgcacagttcaccgacagctccgaacggctgaagctgattttgcccgttaagaatataaacactggcattgctgatcggctttccgatcggcaatgaggaaatggaatccggtatgtcgtgcacgacgtgagctgtcgcaaacaccgttccctcagtcggcccgtagcaattaatcagcttgccaggccccatgatctcaagcgcctttctgacgtgaggcactgacgcgcgctcacccccgaataacacacagcgaagccccttcagccactcctctcccgcatcggtgagaagattaaaaagtgcggttgtcgcaaacatgacattgacattctcctgccggatcagatcagtgagccgttctgtatcaagcagtgtatgttcatctgcgataatgagccgtgccgcattcagtattgatgcgtagaaatcaaaggtaaatgcgtcaaaggcgtaattggaaacagataagaacgtatctttttcagaaaatgccatgtagtctacatgcttgaccaatccttgaatattggcatgagtggtgatattgccctttggctttccggttgtgccggacgtatacataatatacgccggatcatcgggatcaattgcggctgcaggatcgcttgcctgttcctcaaaccgtgctcgatcatcgatgatgagtgttgttcctgtatacggcagctgagccgctttttctttcatctcctgatgtgtcagcagacaggctgccgcactgtcagccagcatgtacgagattcggtcctccggcagcttcggatcaaccggcagataagccgctcccgcttttaatacgccgagaatgccgatcaccagctcaagcgagcgcttcgtgtacaacgcgacaacggtgtccttacccgcaccttgcttttgcaaacggcgcgcaagacggttcgcttcctcatctaattcacgataggaaagagtctggccggaatacgtaagcgccggtgcatcaggatttacattcaccgcttccttgaaccaatctgtcagaggcctcgcctgatgagtctgagccggcgggtttaagccggtaagcagaagctctctttccttttcatcaacaagtctgatcgtattgacaggctgatccggcttctggatgagctgctgaatcgctgtgagaagctgagattttaagcgcaggataaacgcctcatcaaacacattcccgttataggcaagcttaatcagcatctcatcacctggagaagccatcaggttgagatcataattcgatttctcaaatacatggacgtcctccatatcaaagccgttttcactgttttcttcattttttgcatcctgaagcggataattttcaaacacaatgatgtggtcaatcagctttggctgatcggcctggctttggatatcatagagcggcacatattgatgcggctcagactgcagcgattgctcctgcagctgcttgagcaagccgttaaatgtggtatcctcagacagtttcacccgcctcgggacagcattgataaacagcccgaccatatgttcaacgcctttgatttctgcgggacgcccggaaacgactgtgccgaagatcaaatcgccggactgctggtagcggctgattaatacactccaaaccgcctgaagcgccgtactcaaagtggtatgctgcgattttgcaagctcggtaaatgcttttgtttccgcctccggcagtgagaagagcagctctttcggctcatagccgtccttttgtttctttctttgctccgcaaatgtcgtttgtccttcaaaatcttctaagtacccgcgccagtaatgcagtgatgcttgtttatcctgcttttcaagccacttgatatagtctttatacggtttgaccggcggcaggctgtacggcttttgttcgcgcagggcattgtataccttaaacagatcctgcacgacgatgccgaagcaccagccgtccaaaatgatgtggtggtagctccacacccattcaaagctttcttccgattttttaaaaatggctgcccgcatcggaatatcccgcgtcaaatcaaagcccttgatcttatcctgttctttgtattcattgattttggctgtttgctcgctgtccgttacatgtgtcagatcgatttcttctatctgaaactgccgttttttcaatacgacttggaccggcctttttactttttcgtgaatgaacacggtacgaaatacatcgtaccggtccatgatcacattcatgctttcttcaaggcatttgatattcaagctgccttttactttcattgtcatttgttcgatgtaaaaactttggccgggattcaggagagtatgaaacagcattccctcctgcatcggcgacaaataatacatgtcctgaacctgatctttgctgaattggctcatctgctccgctccccccttctgtgatctgtttttgtcacgttaaattctcctcaagcatgtcaaagatgtctcccatttcatccatctcaagatcctgcgcgctgaaatcgctcggcgtaaattctttctcctctttggccgtgcaatggcggatgatcattaagagattgtctttaaaccgctgcatctgtgtttcgacggtgcttctttcatattcttcctgattgtatgagcaggaaatgacgaagcggccgcctgtaaccatcccgctgaagctcagtgcgtataacgcctctgactcttcgctgacttgacgtcccatatcatatggagacggctcaaaccattccgttttcacttcattgtcaaactgccccaagtagttaaaactgatttcaggcgcggcgcctttttctgtttcatcggatgacagataccggagaatcccgtaaccgacgcctttatcaggaacgcgccgcaccgtctcttttaccgttttaatgacggaagagatgccgtcttccttgctgatctgcagaatcaacggatattgggccgtaaaccagccgaccgtccgtgaaatattgacattcggtatgatttcttcccggccgtgtccttctaagttgatgccgactttgccgttttccgtccattcaccgatcgttaagccgagcgcgctgagcagaatgtcgttgatttccgttccgtacggatgatgaacatctgtgagcagctgtgccgtttcttcctcagtcaattcacatttcacggccgccgtatgtttgacgagccgtttgttcggatcatggtctttcggcagcggccggagttcttccgcatctgcctgcgcccaataagccgcctgctttttcagctcttctgattgcgcaaacgtgttcagcgcctccgcccaatctttaaaggagtgggttttctgcgggaggacgatgctgttttgctgctgcgcctgtttataacctgaagcgaaatcctcaagcagaattctccatgaaaccccgtccacgacgagatggtgaaccgcgattaacagatgatcgccttgttctgtccggtattgctccgcttttaacagcgggccgttctccagatcaagacttccctgaagatgatcggcaagccgctgaatctggcttttcagcatatcctcgtcagttccgtacagatcaacgatttcaaagcttgccttgcattctgtgacagggaggtatgtctgaatgatgccttccctttcttcacggtaaaccatgcggagcgcatcatggtgttcaatcaatgcttgcagggttttttccaccaggtccggatcaaagccgtctttcgcgtgaagcatgacggattggttccagtggtgtttgtccgtgaagtttttctcaaagaaccagcgctggatcggcgttaaggccgcttcgccttcgacagggccctggtcggcctgcttgccttccgtccgctccacataagagacgagctcttcgatggtcggatgctggaagagatccttcatctccagcttgtagccgtgctggttcaggcggctcgccatttggatgcctttgatcgagtccccgccgagggtgaagaaattatcgcttacgccgatctggtcaagaccgagcacttcctgccaaatgtcggaaagcagcgtctccatctccgtttccggcgctttgtatgccgcgcttcccgcttcaatatccggttccggcaggacttttttgtcaatctttccgtttgcggtgaccggaagctcgtccatctccacccagaacgccggcaccatgtagtcaggcagcgtgtctttcagcgcggatttgagcgcttcaatatcgtcctgctgaggcgcgacataggcgcaaagcgcggtattgcccgctttgtcttccacggccgtcaccgctgcgtcatgaacgtccgcaagctgggcgaggcggacttcgatttctgaaagctcgatccggtagccccgcactttgacctgctggtcgatacggccgatgtattcgatgccgcactgcgcgttccatttgacgaggtcgccggtccggtacatgcgctcgccgggcacgaacggatctgcggtaaaccgcttcgccgtttcttcttcacggttcaggtatccgcgcgcaagaccgcggcaggccacacacaattcaccggcaatgccttccggctgcacctgatcgccgtcgccgagaatataaactctcgtattggcaatcgcccgtccgatcgaaagcgatccttcctccggattgatgacgccgcttgtcgcgacgacggtgttttccgtcgggccgtagttgttgatgatcgtgtacggctgtttcaccgcccgcttcagcttgtcgccgccgacgagaagcatgcggagagaggtattttccagctccataaattgttcggccagctgcgtcggcaggaaggtgatggtcacgccgtgctcttcgaaatagtgatttaagcgggtgatatccagccggatcgcttcgtcaatgacgtgaagctccgcgccgatagtccatgtcgggaacatctcccagatggaggcgtcaaaaccgaagcccgcgtatttggcgcttttatcatccgccgtcatggcgaatgcgtcgtgatgccagaagcacaggttcaccagcgcatggtgttcgaccatgacacccttcggctgtccggtcgttcctgacgtgtaaatcatataagcgagatgatccgccgttgtttccgtctgcgggttcgcttcatcgttttcatcaagcggcaggctcagaatggagcggctgccgtcaagcaggatcgtttctccgttgtagctttccggcacgcccagcgcttcctgggtgagaagaagcttggccccgctgtcctgcagaatgtagctgatacgctcttccgggtagtcggggtcaatcggcacaaatgccgcgcccgctttcaggacgccgagtacgcccgcggccatttccaaggacggtttcgtcaaaatgccgacacgttcgtcagccgtgacgccgcagtccatgagaatgcgtgcgatgcgattcgcccttgcgttcagctcgccgtacgtccatttcgcgccgttgtatgccgcggccggccggttcgcgtagcgggcggccgtatcttcaaagagacggtgaaccgttttgtcccgcggcacagaaagtgtttttcctttccatgcgtcaaggagggcttgtttttcagcatcgctgatcagtgaaatctcaggcagctttctgtccggactttctgccgcttgcttcagaatccgcaggaacccggcgctccacttttcaattgtttcttttttaaacagatcagtcgcatattcaaactgaaggccgagaccttcttgatccgtaaagccgccgagtgtcagatcgaatttcgccgtgccttggtttgactcatacggagtgatgcgcaggttctccagttccagtgtttctttatccggatcttctgtcgtcaccataacctggaacaatgggttgcggctcatatctctcggcaggtcaagctttccgatcagatcctcaaacggataatcctgatgcgccagcgcgtcgagattggtttgtttcactcgttcgagcagcccggcgaaggtctgctcttttcgcgtttcattgcgaagcgcaagcgtattgacaaacatccccggcatttcctgaacttcggcgctcgttcttccggcggtcaccgagccgataatgatatcgcgctgccccgtgattttgctcaaaaagacatggaacgcggcgtgaagcaccatatgaagagtcgctcccgatgattccattaattcacgcaccgctttttccgtttcacgccccgctctgaaacggacggattgtcctttaaaactttgaaccggcggacgggggaaatcggtcggcagattcaattcaggaagctcgccggaaaatgcggagagccaataacgctcatggtctttcatccgttcggcctgctcgggttcattctgccagacggcgaagtctttatagtgcaggttcggcgacggcaggcttccgcctttgtaaagatgagcgagctctttgaccagcatgcttctggacacgccgtcggcaataatatgatgcatatccagcagcagcaggtgtttcttttcattcagtctgacaagagcggcccgaatgagcggagccgcactcagatcgaacggcttaatgaatgcctgaatgataagatccgctttctcctcgtccgctgcttcaaagatgtgcaggtcaatgtcagcctgttctgcgatctgctgcatcgggcggccgttttgatcgataaaggacgtccgcaaagactcgtggcgattgatcatctgattgagcgcttcctgaagccttgaaatattgacttctccttccatcagaagaacggacggcatattataactgattgtctcccggtcaagctggttcaggacgtacatccgtttttgggcggatgataacgggtacgcgtctgcactgtcggcaggtgagatcatccgatatccctcagataccgctgatttttcgatatatgcggcaagcaggcggacagtcggctgttcgaacagcgcttttaacggaaccgttttgtccagttcagcctgaatattggcgaggagcatcatgccttttaaagagtgcccgccataatcgaagaaattatcgtcgatgccgagcgtatccgtaccgagtgtctgtttccaaatgcggcacagcttttcctccaattccgtttccggcaagactgaagctgtttgcgccgtttggctgacgcccggtttcggaagggcgtttttatcggtttttccgttggctgtgagcggaatgcggtctacttgtatgaaataagccggaagcatatgagacggcagtgtttcggaaagccgtttgcgaagctcagagcctttcagctcgctgtcggctttatagtacgcgcacagttccggcagcccgccttcgctgactgcgagaacggccgcctcctgaatgccgtttacgcttaacagcacagtttcaacctcttttaattcaatgcggtagccccggattttcacctgatcatccgcacggccgataaattcaatcgtcccgtcaggaagcctgcggacgacatctcccgttttgtacatgaggctgtccggtgaaaaaggatttgagagaaatttctccgccgtcagctgcggacggtgaagatatcctctggcaagccccttcccggtaatataaagctcgccgcttgcgcccggaggaacgagctgcattgctccgtccaatacaagcgcgccggtatttgcgatcgggcggccgatgacgggacgctgctcatattgatcaagacgctccatattgatccgttccgcaatggcgccgatcgtcgtttccgtcggcccgtagtgattgatgaagtcggtatgggcgtatacgtcatgaaacttgcggacatcggacgtgatgatcttttctccgccgagcaccactaaacgaagcgggctgaaacggcgttctgacgtaaaacgggctgtattgacgatcatatggaacaatgacggtgtcagtttcatatacgtaatgccgtttttctgtatatactcaccaagctgatcaggcgcggtgtacgtctctttcggcacaatgtgcagctcgccgcccgcctgaagaatcgggaatatggccgtatagccgagatcaaatgcgtaagaagacagcagcacggatttgtcagcttcggtcaaaccggcttcacggctgaaccatgtaacataattgattagattgcggtgctccagctggacgcctttcggtttgcccgttgttcccgaagtataaataatataggcaagctggtcggcgccgggctccgtttcaagccggtcggcgctttcgttctgccattctccgtcttccattacgaccgtttttcctttataaacggcggccgcggtcatgtttctctcattgacgaccagaagcttcgttccgctgtcttcgagagagtagcggattctctcttcaggagtctccggatcaatcgggagaaatgccgctccggctttcatgacgccgagaatcgcggtaatcaagtcggccgaacgatccatcataatggccacgatgtcctcactgcccgttccgcaagcctgaaggtggcgggcaaaccggttcgagcgttcatcaagctcacgatatgtcagacttattccgcccgcaaccgccgtgagatcaggcgttttttgcgcttgccgttcaaacagcgaaacaaaagtgccctcaggcagatccgcttccgtacgtttttcatcagaaaggagcgcttcccgttcaggagcggacagcaggcttgcgtcggccagctgaatatccggattttcagcgcaggctttaatcagattgacaaaatgagcgctccagcggcggatggtttcgtccgcaaataaggctttcgcgtaatcaaagctcaatccgacctcttctccgcgttcagccgcttctaaggaaagatcaaatttagcgacatgatgatgcatggagtatgaagaaatctccaaatctccgagccgcagggccgggatctccatgttctgcatattaaataacacgctgaacagcggactccggcttgtgtccctcgttaacggcagtttttcaattaattcttcaagcggatagctttgatgctcaaaagcttgaaggctcgccgttttcacctcatccagaaattgtttgaacgtttttttgccggcaggatgcgaccgaagcgcaactgtgttgacaaacatgcccggcacgtcttggagatcaggatgctgtcttccggccgtcggagacccgactatgatgtcttcctgccccgaatatttggacagcagcacttgaaaagcggctaacaagaacatgtacatcgtcgtatccgtatcagccagcagcttcttaatctgcgccgtcacctgtttatcaagcccgaagatgatgcgttccccttcaaaactgcgctcggcaggacgcgggaaatcaagcggcagatccaacaccggcagatcgcctttgaacgtatcaagccagtaggcttcgtgctgatcgaaatttgctttttcacgctgccagactgaaaaatccttataatgaatccttggcagcgcaagctccgtgccttgataaagcttcgcaagatcaccgatgaaaatgcccattgagcttccgtccgtaataatgtggtgcatgtcaatcagcagaagatgccggtcttcttcaagccggatcagcttcgaacggacaagcggcgcgcggttgagcgcaaacggcctgataaaggcttttgtcagctcttctgcatcttcttcccggccctcggcggtttcaagctcaaacgacacatttttatgaatggtctgcacgacttctccacctgccatgtcaaacgacgtacgcagtgtctcatgacggttgattaatgcctgcatggcctcttcaagacggtttttgtctactgatccttccagcaaaagtacagcagggacgttgtagctcgtgctggcctgtccgagctgattaaggatatacatcctgcgctgtgctgaggaaacaggataatgcttctgataaggcgcttgtcggatcggttcaaactgctgctcctcctcgctctcatgctgcaaataatgcgcaagctcctgaatggtcggcttttcaaataacactttaatcggcacttctttttgaaagtgctcctggattttagcggtcatcatcatggcttttaaagaatgtccgccaatcgtgaagaaattgtcagtcacacccgcttttacaccgagaatgccttcccaaatgtcagcgagtttctgctccgcttccgttttcggcgctacgtattctttttgaacggcttcagcctgaggctcaggcagcgcttttttatcaatttttccgttcgccgtcagcggaaactgattcatctggatgaagtgcgcgggaatcatatattccggaagtgattccgaaagcgttttgcgcaggtcttccggcgaaagagcttggtctgccgtaaagtaagcgcagatttcattttcatccgctttatttttccggatcacagccgcagattccgtcacattctccgcctggctgattttcgcctcgatttcgccgagctcgattctgaaaccgcggacctttacttggttgtcaattctgccgagaaactcgatcgtgccgtccggaagccacttcgccaagtcccccgtccggtatatcatttcatccggtctgaacggatcgcggacaaactgcttctccgttaattcagacaggttcacatagcctcttgccactccgcttccgccgacgcacagctcaccgggcgcgccgatcggctggaggttgcggttttcatccataatgtacgcagtggaatttccgatcggcttcccgatcgggaccgaaccgtcataatcctgatcaatgagaaaactcgtcgaaaacgtcgtattctccgtcggcccgtatccgttccaaagcgacagctccggtgatgcctttctcactttgctgacgatatgcggcacaagcgcatcaccaccgatgatgaggtgccggagcgtgttaaacatgccggcatccttttgggcaagctgattaaacagcggagacgtcaaccacatggtcgtgatccgctgctctttcagaaattgggcgaattgtccggcgtcaagcagcgtctcttttttcaccgggtgcaatgacgctccgttcagcaatgcgccgaagacttcgaaggttccggcatcaaagctgacggctcccgtttgcgccatccggtcttcttcatgaaccggcacgtaattcgaatgtttgacgagcctgatgatatttctgtgttcaatcatgacgcctttcggtttgccggtagatccggatgtatacatgatatacgccaagtcgttgccgccggccggaagattcaagtctgttccgcttaccgtttcatccgcgctttcatccagcatgacgaccgggacttgcaatgcgcccgcttgttcttgatagccctgaactgtcagcacgagccgaatcgagctgtcttccgccataaagcggagacggtcctccggaaaagccggatcaatcggcacatatgcgccgcctgcttttaggacggcaagcattccgacaacggtttccgcagaccggtcgttcataatagcggcggtccggcctttttccagcccgctcttcacaaggtgtctcgccagacggttggccgcttcgttcacttcacggtaggtccattcgcgtcccgcttcttttatcgcgatgcttgcaggcgtccggtttgcctgtgtttcaaacaaacggtgaacggcctcctcttccggaagcgccgttttcgtatcattgaatatctcaacaatctgccgctcttcttcgcctgaaacaagaccgagttcccgcacgggcgcgtcaggcgttccgaccgcggctttcatcatgcgggtcagatggtgcgccgttcgttcgatggcatcatgagcgaaagccgctccgttgtatttgattttgacagtccacgtttttcccggatacacgatgagattgaaatcaaagctcgtctgctcaaaagcatgttcaactttaatggaaaagccgagtctttcctccatgcccccgttttccagctctttgtccagcggatagttttcaaacgcgaccaaatgatttaagaggctgccgtccagggcggagcgcttttgaatgtcatagagcggcacataatcatagcgctcggcttccacggcgtttttctgaactgccgccatcacgtccgaaaaggctgcatctttgtcaattttgattctgacgggaattgtattgatgaacagccccgccatcgtttctatgccgttgatttctgaaggacggcctgatacgacggtgccgaacaccacatcgtctgtatagttgtatttgctgagcaccgcaccccaaacggcctgaaacaggttaggccccgtgacttgatgccggttggcggtctgctgaatctgcgcgaccagctcttcatcccagacaaaagaatattcttcattttggtagtctttcttttctgatgccagacggcccgggagcaggctcggctgttcgaaatccgccagtcggctgctccaatattgttccgcctcctcataatcccggcctccgagccatttgatatagtcagagtaaggtttgccctggcttcccccggcgggccggccggcacgaagcgcttcatagttttggaacaggcttttcatcaaaacgcccatactccagccgtccatgacgatatgatgattgctccagacgagatacagctccttctcactgagtctgaacaccgctgctttaaagagaatatctttcgccagatgaaagccctgctgctgcacgccgcgtttatagcgttcaatatattcggtttggcgcgcttcatctaattgactgatatcttcatagtgcaccttcgtcttccgctcggctaatacgacttggcgcggtttttgaagctgctggtgcacgaataccgtacgcaggatgtcatatgtccggatcagctcattgacgcttttttcaaaaagctccagctgaaaacttccgtgaatcctaagctctaattgtgtgaagtaggaggaagaatgcggatcaagcagcgcatgatacagcattccctcctgcatcggtgtgagtgcatacaccttttgaatcgattttttgctcatatgtcacctctgtcttttctgttagagaatttccattaatttatcaagttcatcaagcgtcagatcatcatcgccaagatcgctaggcgtaagctcaggtccgtcttgggccaggcagtgatctatgattttcaagaggtgccctttaaagctgtcactgaacgattgaatggttttttcatgaaattcgagagaatgataggcaaacgtcatcgtcatctgcccattttctataaatccgacaatatcaagcgcattcggcttctctgtgtcagggctcagcgattgtcctgacggcatcccggatcttgtaaataagccggaatccgacatctcattaaactggcctaagtagttaaagctgatatccggatcaatctcaaatgaaagattctctttatgctcaggcgccgttacataacgcagaatgccgtagccgactcctttgttcgggatgtgtctgatgtcttctttcatttgtttcagctgatatgaaagatcgtcggcgtgcttcatctcaaggatcatcggatacatgctcgtaaaccatccgaccgtccgggtgatattcaagccgtcaagaatgtcttcgcgtccgtggccttccaaatgaacgccgatcgtgtcttcacccgtccactctttcagcgccagtccgagcgccgtgagcaggatgtcgttcatttcggtgtgataggcttcatgtacgtttgtcgtcagctgttcagtttgttcaggcgtcagagagaagctgaccgttctcgtatgtctcatgcgctgatcaccagactgcctgtctttcggaagctgagtgcatacctctttttcctcaagctctctccagtaatccgcttctttcagaaacgccttcgtatttgcgtattctttgattctctcggcaaattcggcgaatgaatgtgttttcggcggcagcgcaggttcattgccttgcttcagctgcgtataaacggacgtaaagtcctccagtaaaatccgccaagatacaccatccacgactaagtgatggattgcgagaagaaggtggtctccatcttcagcccggaagagcccggctttcaagagatgtcctgtttccagtgaaatactgctttgaagacggtctgcttcccgttcgatacggtcctcatggtcttcagcaggtccgttcagctcaaagacgttcagttcaacagacacatcctcaagccctctgtaatacggtttttgttcacgataaatcatccggagcgcatcatggtgttcaatcaatgcttgcagggttttttccaccaggtccggatcaaagccgtctttcgcgtgaagcatgacggattggttccagtggtgtttgtccgtgaagtttcgttcaaagaaccagcgctggatcggcgttaaagccgcttcgccttcgaccggtccttggtcggcctgcttgccttccgtccgctccacatacgagacgagctcttcgatggtcggatgctggaagaggtctttcatctccagcttgtagccgtgctggttcagacggctcgccatttggatgcctttgatcgagtccccgccgagcgtgaagaaattatcgcttacgccgatctgatcaagaccgagcacttcctgccaaatgtcggaaagcagcgtctccatctccgtttccggcgctttatatacggcgcttcccgcttcaatgtcaggcgccggcagggcttttttgtcaatctttccgtttgcggtgaccggaagctcgtccatctccacccagaacgccggcaccatgtagtcaggcagcttgtctttcagcgcggctttgagcgcttcaatatcgtcctgctgaggcgcgacataggcgcaaagcgcggtattgcccgctttgtcttccacggccgtcaccgctgcgtcatgaacgtccgcaagctgggcgaggcggacttcgatttctgaaagctcgatccggtagcctcgcactttgacctgctgatcaatacgcccgatgtattcgatgccgcactgcgcgttccatttgacgaggtcgccggtccggtacatgcgctcgccgggcacgaacggatctgcggtaaaccgcttcgccgtttcttcttcacggttcaggtatccgcgcgcaagaccgcggccggccacgcacaattcaccggcaatgccttccggctgcacctgatcgccgtcgccgagaatataaactctcgtattggcaattgcccgtccgatcgaaagcgatccttcctccggattgatgacgccgcttgtcgcgacgacggtgttttccgtcgggccgtagttgttgatgatcgtgtacggctgtttcaccgcccgcttcagcttgtcgccgccgacgagaagcatgcggagagaggtattttccagctccataaattgttcggccagctgcgtcggcaggaaggtgatggtcacgccgtgctcttcgaaatag

SEQ ID NO: 7 - DNA, 169571 bp, Bacillus methylotrophicus
ggaggcgtcaaaaccgaagcccgcgtatttggcgcttttatcatccgccgtcatggcgaatgcgtcgtgatgccagaagcacaggttcaccagcgcatggtgttcgaccatgacacccttcggctgtccggtcgttcctgacgtgtaaatcatataagcgagatgatccgccgttgtttccgtctgcgggttcgcttcatcgttttcatcaagcggcaggctcaaaatggagcggctgccgtcaagcaggatcgtttctccgttgtagctgtccggcacgcccagcgcttcctgtgtgagaagaagcttggcgccgctgtcctgcagaatgtagctgatacgctcttccgggtagtcgggatcaatcggcacaaatgccgcgcccgctttcaagacgccgagtacgcccgcggccatttccaaggacggtttcgtcaaaatgccgacacgttcgtcagccgtgacgccgcaatccatgagaatgcgcgcgatgcggttcgcccttgcgttcagctcgccgtacgtccatttcgcgccgttatatgccgcggccggccggttcgcgtagcgggcggccgtttcttcaaagagacggtgaaccgttttgtcccgcggcacagaaattgtttttcctttccatgcgtcaaggagggcttgtttttctgttttattcaccaatgaaagctcagaaagcttcgcagccggattttccgctgcggcttctaacagttgaagccagtaatgcttccatgtctctgccgtttccggtttaaacagcgcggtgttatattcaagcacaaacgttaaaccttcgtctgtgtcctcagccgtcattgtcaggtcaaacttggctgtttttctgttaaacggatggtgcttcagctcaattccttccatgaccagatcttccgcatttgcattttgcattgagaataccgcatcaaacagcggatttctgctcgtatcacgctgcacctcaaccttttgcagaaggtcttcaagcggataatcctgcgcgtcaaatgcatgtaaagcggtttgttttacttctttaagatagtctgtgaacgttttgtccgcctccggatacgtacgaagcgcgagtgtattcacaaaaacaccgatgacgtttgcgagatccgcatgtgaccgtcccgcaaccggcgagcccacaatgatgtcatgctgtccgctcagttttgagagaaaggcgctgtatgacgccagcagcaccatgtacatggtagaatccgtttgtttcgcaagactgcgaagagccgacgtctgttcctcagtcagagaaaagaccagcttgtctccttcaaaggtttgcacggccggacggctgtaatcagccggcagcgtcaataccggaagctcgccgtcaagctcccgaagccaatgctcctcctgcttgcggtactgctctgattgaataaatttctgctgccataccgcatagtctttataatgaatccgcaacggctcaagcgtttcaccgccatacaagcgggacagttcatctatcagcacgccgactgaagcgccgtccgaaatgatatggtgcatgtcaaacagcagcaggtggtcatgttcagccagcttgaccagtcccgttctgacgagaggaagctgatccaggcggaacggccggataaagctctgaataatccgttcagcatcttcttcagaggcttcataatattccatgttgatatcagcttccgtccatatgcgctgaaccgtttctccatcctgtatgtcaaatgtcgttctgaaggcttcatggcgttctgtcagctgtttcatgacggatttcagcttttctgcatcaagctttccttttaagcggagcacagacggcatgttatagcttgtttcagcgccttccagctgctgaagcacgaacatccgcttctgcggtgaagaaaccggatacgtttcccgctcggccgccggtgcgatgctctcagccgccttccgctcagccccttcaatcagctgcgccagccccgcagccgtcggagaagtgaacagatcctttaaggtaagctgcacgccgaatgtcttctggataagggccagcagtttcatccccgctaacgagtggcccccgatctcaaagaactgatcatggacgccgacccgctccatttgcagcacctcagcccaaatatccgccagtttttgttctgtttcattgcgcggcgccgtatatgacacggcattcgctgcggtcacatccggcatcggcagcgcccgcctgtcgatttttccgttccctgtaagaggcagttcatccaattgaataaagacggacggaatcatataagccggaagatccttcgccgaatgctccctcagctcccgggaagagatttccctgaggccgacaacatacgcgcaaagaagtttgtcacccgcgccctgatccacagcgagcacaatgcattcctgaatctggtcatgactttgaagctgatgctcaatttcgccaagctcaattcgctgaccgcggattttcacctgatggtcgatacgtccgataaactcgatatcgccattcggaagccatctggccaagtcgcccgttttatacatccgttcaccttccttaaacggatgctttacaaatttttcttccgtcagttcaggacggttgtagtagccttctacgagtccttccccgctgacgcacagctctcccgcgatacccgccggctgaatgcgtccggctgagttcatgatgaagacttccgtattgctgaccggtttcccgatcggaacggagagcgtatcctcttcaatgacatccaccggatggtatgtcgcaaacaccgtgctttccgacggaccgtacatatgaagcagtcttccttttccgactgccgcaagcgcctttttgacatgttctacagacgctctttcgcccccgaacatgattttccgaagcgtcgtcagacaggacggctccatatcaacaagcaggtggaacagggccgtcgtaatcatcagaatgctgacgttctcccgtttgatcacacgggacaggcgtgacatatccagcacggtatctttcgggacgatcacaagctttgcaccgtttaacagcgaaccgaacatatcaaacataaaagcgtcaaaaacgtagtttgacagaccgagcactgtgtcctcttcagaaacagtcaaatagttcgtgttttttaccgtccgcaaaatgttggcatgtgtgacgatgtttcctttcggcgttcccgtcgtgcctgatgtataagtgagattggcaatcgttttggaatcaaacggcaatgctggattgtgagagtccttttcatagctcgcctcatcatcagcaagcacaatgacgccttgaaaaccggccttttccgcaagcggcttgaggctttgctgagtcaggagcacattcgccccgctgtcgcggaagaaatgctgaatccgctgaaccggatgctcaggatcaatcggcacataggcggaccccgcttttaacacagccataatggaaacaatcatatccattgaccgttcacacagaacagccgcggtttttccgccgcctccgaccgaaagaatatgccgcgcaagcatgttggcgcgttcattcagctgctgatacgacagggtttccccttcgaactgtagagccgtccggtcagggttctttcggacttgttcttcaaagatctgcacgatcgtttgatctttcgggtataccgtgcgttccgggttgaaccgctgtaattgattcaaagcctcccgttcagaaagcagatcatattcgctgattttcgcatccggctgagctgccgcgctttccagcagacggacatagtgcgcaagcatgcgatccgcagttgagcgcttaaacagcttcgtgcaataatccaaatcaagcgcaatgccttccgctgtttcccgagcctgcatggtcaggtcgaatttggcgatattgaagtttgtttcatgaagagacagcgtcagattaccgatctccgcaattccgtccgaagcattttgcagactgaacatcgtgtcaaatatcggatgcctgctcatgtcccggggcacgttcagctcctcggtcagccactcaaacggataatcctgatgagaaaacgcatccagcacctgcttgcgcacatgacctaacaagccggcaaatgtctgatcctgcttcacggagcttcgcagcgcaagcgtgttgacaaacatcccgataagcccctcggtatcggagtgatttcttcccgctgacggtgttcccacgatgatgtcttcctgtcccgaatacttagaaagcaacgtatagtatgctgataacagcaccatgtaaagggtggctccgtttttctccgcaagcttccgcagccgttcccgcagcattttcggcagcttggcggacacgcggtcaccttcaaagctttgcacctgcggccgcggataatcagggagcagctgaagcaccggcagttctccgctgaagacttctttccagtacgcccgctccttcttgtagccttctttcgcccgttccgcctgccatacggcataatctttatattgaatgcgcaattcaggcagctgatttccgccgtagatgtcagccagttccttcagcatgatggaaatagacaccccgtcagaaatcaggtgatgcatatcaaacagcagcatatggcgattgtgaccgagcgtttgcaggccgattctgaacagcggcgcctcagataaatcaaaacggcgcacaaagtccttcatgacctgttcattcgttcttccgcgcgcttcgatcatttcaatatgaaacggaacatgctcgccaatcacttgtctcggcgtgccgtcctctgattgaaacgatgttctgagcgcttcatgcctgctgattaaggcagaaaatgcacgctcaagcttttcacggtctaaagcgccctcaatcatggccgcagccggcatgttatatccgactcccgcgtcttcaaattggcttgcgatataagtccgctgctgagcgagcgaaagcggatagctcgcctgcttctcagccggctcaattgcactgaatgccggtccttcgtttcggttttccgcataatcggcaagcgccgcaatcgtcggatgctcaaacaagtattgcagcggaatatcaacgcccatttgcttatgaattttcgtcagaagcgtcattgcctttaatgaatgaccgcctgactcgaagaaatgatcataaatgcccgccttgtccattccgagaacttcctgccagatgacggcaagtgtttcctccgtttcatttcttggcgcggcatattcagatgagctgacagcctgcacatcaagcgcaaacagctttttgcggtccgccttcccgctcggcgtgagcggaatttcgtccgtttttgtaaagtaagcgggcaccatgtaatcaggaaggtgcttggacacatactccctgtactcggcagggtgaaactcggttcctttttcctgaacgatatatgcgcagacatctaagctgccctgctgatccggccgtgccagcacgacggcctgcgccgcgcccggggcttttctgagcaccgtttcaatttctcccagctcaatgcggtagccgcggactttcacctgatcatcttcacggccgatatattcgatcgtcccgtccggcagccagcgcgccatatcacccgtgcggtacatgcggccgcttccgttaaacgggtcctgcaaaaacttctctgcggtcaaatccggaagatttaaatagccgcggcctacaccgtcacccgcgatatacagctcaccggccgtgccgtcgggctgaagccgctggtgcttatccaatatatacagacgggcgttgccgagcggttttccgatcggaacgtacgccgcctgttgattcattccgttatccgcagacatctgatgcacggacgcatctacgcacgtttctgtcggcccgtagacattcgtcagacgcggcgtcctgcccgattgatgaaagagcgtcatcagctgttcagcaacagccgcggacagaccctctcccccaatgagcatgtggcgcaattcaattccgctgacatctcccgccgcagccatcatctgcagatgcgcaggcgttccgtcagtggcttcaatccggttttgacgataatagtccagcagtgccgagccattcgttacagtcgttttcggcacgatataaagcgtctgtcccaaaagaagcgaggcaaaaatctgtttgacggacgcatcaaaatgaaacggagccaaaagcgccattcttaatgtctgctcaccgcattgataaatctcctgctgcagtgattgcaccagatgatgaacttgccggtgctcaatcatcacgcctttcggccgccccgttgtacctgacgtgtagatgatgtaagccagccggtctgattgtgtgctgacaccgtccgcagccgtctcatactgaacagcctcgtcaaaatcaatccgttcggcatccgctgcaggcgcctgtattccggcctccgtcagaacagccttcgctccgctgtcctccaaaatgtactgaatccgatccgccggaaagtcaggatctatcggcacataggcgccgcccgctttcaaaattcccaatattgccgcaatgacacgctcagaacggccaagcagcaccgcgacaggagaatcggctgatatcccggcttgaagaaggcgtccggcgatacggcctgactgttcatgcaatgtgcgataggacaatgttcggccttcatacacaaccgcgggtttgtcagacagtgacttcactttctcttcaaacagccccggtatcgtcatctctccgcggtaattcaccggattgccggaggcccgtttcagcagccgctctttctcggattcagaaagaagagtaagttcatcaattatgcgatcaggagatgaaatcgcatcttcaatcagcgtgatcaaacgttcagaaacagattcaatctcttcccccttgaaaatgtcgctgcgatagtcaaaatcaatcgtcaatttcccggtgtcccatcgttccttcacatgaattgaaatatcatttgtaccgcttccgctgaaaatagggtctgtcaggaaggacagattctcttttttctgccactgcatcacctggtactccagagccaccgtaaacaatctgctcagcgaacttttcgaagcgcgcaaatcattgacaagcaggttatacggatacttttggtggcggagaattttcatcagatccttcatccggcctttaacgaattccaagaacgactgtcctccgtcaacacttgtccgcacaggcaccgtagatacgaacatcccgagcatctgcttttctttcgcattcgtccggtttcccataaacgtacccgtgacaacgtcatcccggccggtcactttgtagagataagtgatcagagctgactggaacagagatagtacgctgactttatgctcctcgcagaatgaatgaatgcggccatataagtcgtgaggaatttcttgagaaaaccgtttcgcatcaagacccgcatctgcctggctccgtttcagggacacaagctccggcacggtctcaaactgcccgttccaaaaatcccgatcctttttaaaccgcttcgactgcacatattcctgctctgtcagcacatgctcgataaaagaaggaatctccgtctgctcctcacttgtcccgcctgaaagctccaaataaatatcagtaatcgcattgcccagaatcgtcatggaaatcccgtctgaaataatgtgatgcacattagcgtaaaaccagacctcattttcactgatcgtgtgcacggaaaaacggaataaatcctgatcatataacgccagaggcttgccagcttcttcacgcccccatttggacagctcgtccgcagagcagccggcttgcctgatatctgtgtgcccgatagagagcggacggtattcgctcacatattgaacgggctccccctcatcatcaagccgcagacggattctcatcgactcataccgccggacgaattcctgtatcgctttctcaacgtaatgagcctgtacgccgtcttcagaaatgagtttcccgaacccggcaagatttgaaatacttgtgttcggatagaatttttctgtataccagatacgtttttgagcatttgttaaaggataaaaagttatttccatatgtgtgcgcctcccctttttaagataaagatgtcaattctcccttagaaacagcctccctctatgtccctaactcattctcaagccaaaagaaccacttacctccaaaaacgatcccgattcaatcaccgccgaaatccgtcatccgttcacccgcgcagtccgaaatgcggcatcaaatttatgagaaatcaagacaaaaagccattgattgtaagcacgaaaggtttacctatttctgcatgtatttctatatatctacttacgttcactttatatgaaaatattgtttttatcaccgaaaaatgggtgaaaagtttcatgcggcacaccgaaaaaaattccgacaaatccagagggtattttgcggcatcccgcaatttattttcaaaaatattatttacgtaaaattaaaaatctttaaactataatgaaaatctgtcgaatatccagttatggcagaatgaaaaaaatttacgtacgtaagctgacccggaaaaaacagcgcaagaaccgaaacagacggtccgaatgttcgcaatatgatttcattaaaccgcaaaaaaagcactctattttacatagagcacttcaaaaagattcctttattgcagttttatcaatgttgattaattccatataatcttttccccacttatacatggcgtccagaatcggcataaggctttctccttgcgccgttaaagaatactccactttcggagggacgacagggtaaacttccctgtgaacgatcagatcctgctccagctccctgagctgattcacaagaattttgtgcgtaatatccggaattaaagctttcagctcattaaaccgcttcgtcccttcttttcccaagtgccacataatcagcattttccacttcccgcctatcacggcaagcgtcaattccttttcgcaattaaacgttttctcatccattcggctcacggacaattctccttcctcttactttttgtacggtcatcatctattcatacacgcttactttttcacacaactttcatcagtttatactaccacgcagttttgctgaaacaaagcgcattgcctgcggggacagtatcctcaaagtaactattagacttcaaagtgcgtacttctcaacatgcggggcactctatagaatggaaatacataaaaaagaggagtggatataaagtggaattacagctggcattagacttagtgaatatcccggaagcaattgaacttgtgaaagaggtcgaaccatatatagatgttgtagaaatcggcactcccgttgtcattaatgaaggactgaaagccgtgcaggaaatgaaaacagcctttcctcacttgaaagtgcttgccgatcttaaaatcatggatgcaggcggttacgagattatgaaagcggcagaagcgggagccgacatcatcaccgttttaggagcgacagacgactcaacgatcaaaggggcggttgccgaagcaaaaaaacagcagaaaaaaatcctcgtcgacatgattaacgtaaaaaaccttgaaacacgggcaaaagaaattgaccaactcggtgttgattatatttgtgttcacacaggttatgatcttcaagcagaaggaaaaaattcatttgaggaactgacggcgattaaaaaagcggtcaagagcgctaaaaccgcaattgccgggggcattaaacttgatacgcttcctgaagccatcaaacaaaacccagatttaatcattgtcggcggaggcattacgggagctgacaataaagcggatgctgctgctaaaatgaaacagctgatcacacaaggatcatgaaaacgactgaatacttacatgaaatactaaatgaaatatcccgcaccgcagcattaatatccgacagtgaagctgacaagcttgcggatcagattttatcggcagatcaaatcttcacgtccggagcgggacgttccggctttatggctaaagcgttcgccatgaggatgatgcacatcggtctgaacgcttacatcgtcggtgagacgcttacccctcccctccaagaaggcggtctcgtcatcatcggctcaggctcaggcgaaacaaaaagtctgcttcatacggctgaaaaagccaaaagccttaacggcatcatcactgcattaacgattaaccccgactcaagtctcggcaaacttgcggatcttacaataacgattcccggctctcctaaggaagagaccggcggagacagaaagacgattcagccgatgggttctttattcgaacaaactcttctgctgttttacgatgcggttattctaaaaatcatggagaaaaaagaattgaattcagcagacatgtttacaaagcatgcgaatctggaatgatttgctgacggccttcttatcagatggccgtctttttatcgtcttgttgcgcacggtcatgcagaccaaggttttcgggtcggacactcgcagacgaagatatcctgccggtgagcttatcgctataataagtcaattgacgatacacccgcaaccgttcatttctgaatagggaaacggcaaaaaacactttctgattgaatttttaatgaataaagttgatttgtgcggatggttttacagatattcagctgaattgcggctgagaaatatattttaacagctttacagccggccgattctgctttattcttggaccagctttacagcaattaaaactggaggtgattgatactcttgaaaacattaaaagcactgctgcttgttcttatcatcattgccggagcagtcgcggccctgatcaagggtgatcttttctcagataacgagcagaccgttcagaagagtgattacgacaaagtaatcttatttccgtccgatcgatatccggaaacagcaaagcatattaaggacgcgataaaagaaggacattccagcatatgcaccattgacagagacggagtacataagcggcgtgagcaatctcttaaacatgtgcctgtcaaaacgggatacgatagggatgaatggccgatggcggtttgtaaacagggcggaaacaacgcctccgtagaatatatttctccggcagacaaccgcggagccggctcttgggtcggacaccagcttaccaatgatcccgacggaacgagagtattatttaaaatcaagtaaaaaacaggaggaacagcgcattgaataaatcatggaaaccgcaagaactggccatttcttatcatcaatttacaatcttccaaaaagattcagaaccgcctgttatcgattggaccgatgaagccattgaaaaaggatatgcggaagctgacggagctgtttcatttgaggcaaggagaaatacgagggcatttatcgtcctcaggcttaacacaagtgaaccggtaccatcctatgagaaaaaagcgactgttccctttgaggctgtaaaagatggaattgagattgaaagcgtgatgtcaaagcggcttttctttcatattccgaaaggccgatacagccttacctgttattcagtgcctgccgaaatatccgatcttcatgcggatacgtatattattgatgcagccgcaatgtaaaagaaagccctgagagaatcttatttctctcagggaacttttataaacttttaccgtttgtttcaattacattctggtaccaataaaaactttttttcctgatccgtttcaaatccttttcatcttcttcatctcgattgatatagacaaaaccgtagcgtttttgatagccgttcagccagcttaatagatccgtgaatgaccagctgcagtagccgatgagatgaactccgtcactaatggcctctctgcactgttcaagatgggagcgtaaatagtcaattctgtaatcatcctgaattgagccgtcttcttctattttatcgaattcccccagcccgttttctgttataaaaaccggcagctcatagcggctcgttatacgccggaggccgatgcgcagacctatcgggtcaatcgtccaatcccaattactcgtcacgaggttaggattctttttcgttttaaacagccccggtataccagtatcctggtttgtccctttctgaccagtcgtgttcattttcccctccgatacaccgtcaagaggatttctttcgtacgtaatcgtctgataataattaacaccgataaaatccggcttgccttttgcaagcaattccatatccccggcttcaatggcgggcgcccagcccttttcctttaaataattgaaaggaatttgcggataagtcccccggcaatacatatcaagccaccaatgattcataaattcctctgcgttttcaaatgcagttatgtcttcaggatgacttgtaagcggataagccggtgaataagcgaagctcgggccgatcatgccgccaggaacatattgtctgaaggattcaatcgctttggcattagctaaaaatgcgatatgattggcttcataaaatcgttttctgtcctttacgccgggcggatgtgtagctgtaataaacccgttatgaaaattataattctgctcatttaacgtgacccagtatttcaccttgccggcgaatcttttgtataacgcaatacagtaattattaaaatcatcaataatttttcttgattcaaagccgccgtattcatccatcagcgcctgaggcaagtcccagtgataaagagtcagcaccggctcaatatcgttagaaatcaattcatcgatcaggtcttcgtaaaatgcgatccctgattcgttgatttcccctctgccattcggaaaaattctcggccagctgacagaaaagcggtaagctttcaaacccatttctgccatcaaggcgatatcttctttataacgctcataatggccgactgctgtatcgccatttgagcctttaaacgttttacccggtattttcgtgaataagtcccatactgaaggtcctttaccgtctttattccaggctccttcaacctgataggcagccgaggctgacccccatagaaatgtatcagggaacaggccctgttttttatgtatcatgtgtttcatcctcctgatgcgtatgatattgatatcatacgttatgaaacgcgtttcagagcaatcccgataaaaacaaaaaagcatccggcttgccggatgcttaagaatgatggtgccgcttttccaatttatgaggcggaggcttcgggacaaacccattttgtttcatcatgttaaagcgcctatccatatgctgtttaatatgttctgctttttctttcggcaggactccgtactcaacatatttggatatgacatgttttcgtttttcgagcacttctttttcaagtgattcaatttcttttttctgctgttccgtgagtgacatggttgaaggcatttttgttccggcggcgtgtgccggcattgtgaaaaccattgctgtaatgaaaaacgcagctaaagacaatgcagcttttttcatgactctttcctcctttaacgtttgttatatgttgctccctcatccattttttatgcaaaaaaagagcgaaattattcgctcttttcaatcgattcgtccggcagcgcgtatgtgacatacgttcccgctacaaaatcgtggattgaccgtctgtcttctctcattccgaccatgaatgcgctcacgatcacaccgattccaaacgtcacgccatatatcaggccgcccacaagcactctcaaaatcatagtgaggaagcctacctgagtgccgtcttttttgacgatgcggataccgcagatctttttgccgataacataaccgttccagtatacagggagcaaaatagcataaagagtcaaaatgatgctgatcattgtgctctcattcggatcttttcctgttgccagcataaaaataatcgccaaaggcactgaagtaattaaatagtcgagtaccacggctcccaatctgatccaaaatcccgccggtctgtaaatattcatcgtgtttctcctcgctatggctttaaaatcactttaatgttgccatcttcttttttgtcaaatatatcatatgcagcaggagcttccgcaagactcattttgtgtgtaatgatatccgtcggatcaatttcattttgttcgatcatttgatacagcatcggcatcagatgaataacgggtgcctggcccatttttaaagaaacgttgcgtgtgaaaaaatcaccgagcggaaagccgtccgcttcagaaatgtatgcgcccgtgagctgcacggttccgaacttcttaacggcttctgatgctgtaagaatcggactgatcgttccgaactgattcggtttttgctctgttttttcttttgaaagcggcgtgccgtccattccgacacaatcaatcactacatccgcgccccctgacgtttgttcatgcagcagtttcccgatctcatcatgttctgaaaaattgaaggtctctgctccgtttatgcgtctcgcatgttcaaggcggtgcgggacttgatcaactgcgataacccggttagctccttttttccacgcgaatttttgcgccattaagccgatcggacctgatcccagaatcacgactgtatctccttttttcactccgctgtgctggacgctccaaaaggcggtcggcatgacatctgacagaagcagcacctgctcatcttcaagctcactgtctgccggaaccagaaaagaagagaaatcagcataaggaacacgtaaatattcagcctgcccgccgggataattaccgttaaactccgaaaaaccgaataagccgccggcatctgtatgaggatttggattagattcatcacactggctttccatctggtgcttgcaataatgacattctccgcagccgatgttaaaaggaatcacgacccggtcgccttttttcagctttttgacttgactgcccgtttcttcaacgattcccatcggctcatgcccgacgatataacccggatcggcgggtattccgtttttatataaatgaaggtctgaaccgcatatcccggttgcggtgattcgaacgatgacatctctctcatcttgaatggcgggtgccgggacttctttcacttccatatgttcttttccttggtatgtcagtgctttcacacttggtcagctcctttttcatcactccttcccttttcacctgcttctaaacttggccggtatgttattcggcccgctgaatatcccattgaaaaggttcttcaagctgcgaccagtcggaatcgaactcagacggcgtgagcaggcactgatccaattcctttgtaatggctgcttcatctaaatctgttccgataaacaccaggttcgtatgacggtctccgaattggtcgtcccaatcttccagaatctccggttcctgctgtttgatctgctcctgctcaagtttcggcattgccgccacccaataagaaacaggctcaatcgaaaccgccggacccgcctgagacatcagcagcgcaaggctgttgcgggttgcgcaccaaacaattccttttgcgcgcacaatgctgtcaggcattgattgatgcagccagctgtcaaaacgagcggtatgaaacggcagacgccgcgagtacacaaacgaagtgatgccgtactcttccgtttccggagtgtgcgcttcatgacctgccgtcagctcctttatccatcctgctgatgaactcgcttcctcaaactcaaataaaccggtattcaatatgcattcggcaggcacttctccgcggacggaccggatcagtctggcgcggggctgtaatgcgcgaaggaccgtttccagctgttcaagctctttttcgcccaccatgtcgcatttatttaaaatgagtacatcacaaaactcgatttggtcaattaataaatcggcaatcacccgttcatcctcttctcctaccgcttccttccggtcaagaaggctgtcaccggactggaaatcatgccagaagcggtttgcatccaccacggtcaccattgtgtccagcctgcagaatgttgtcagatcaatgcccatttcttcatctatataagaaaatgtctgggcaacgggaatcggttcgctgatccctgttgattcaatcacaatataatcaaatctgccgtctttcgcgagtttctcaacttcgactaataaatcttcacgcagcgtgcagcagatacagccgttggataattctacgagtttctcatccgtccttgacaagccgcctccctgcttcaccaagcccgcgtctatatttacttcgctcatgtcattgacgatgacggcaatttttaaaccgttgcggttttgtaaaatatgattcaaaacggtcgtctttccggcaccaagatagccgctcaatactgtaaccggaatttttttcataaaatagcctcctgacaaaatagaatgattacgatttataccctgcacctgccttattatcatcatgatgtacattattataaatcgtaatcgttactatttattctgatgtattctccgtttaaaatcaagtgaaaaataatcaatcataaaaaagacacgctgtcatacgtgtcttccgcccaaacttaaacatccgcaggactgttttcagtgccatagctttttctccaaaaatagcctgcggccagaacaagcacaaatgcgagcaatgtgatacatgagaaagagataaaaccgatcgcataagttcccgtcatctgcttcaatgatcctaaaatattcggaaggaaaaaacctcctatgccgccggccgctccgacaattcccgtcaccattccgatttcttttgcaaagtgctgagggacaagctgaaataccgctccgttgcccataccgagcgccatcattccgataaacagcagaacgatcaccgttgaaagcggaggcaggctgctgactcccgccatacacagagccgcgatgacaaacagtacagccagaactttcgcacctcccgcccggtctgaaatccagcctcctgcagggcgaaaaaaactgcccgctgcgacacatattgtgacgaaatcaccggcatggatttttgacaattgatattgatcaacgaaaaaaatcgccaaaaaacttgataatcccacaaaacctccgaaagtgacgccgtacagaagacagaaacaccatgtttccttctgcctgaaaacgtgaaggtagtttttaagcggctgcggtgcgggctgtgcaggagagtccttcgccatgacgataaacagtataaaaacgatcatcaacggaagaagcgcaattcccattacactgtgccacccaaactgttctgcaaggcggggaccgaacaatgtcgcaaacaaagtgccgctgttgccggcacctgctatccccattgcaagcccctgcaagtgaggcggataccaccggctcgccatcggaagcgcaacagcaaaacttgcgcccgctacgcccagcagaatgccgatcgcatacagctcagtcaaagaacggccgccgaatgccccccaaagcagcgggatcatcgtgatcagcatcccgatcacggctgttttcttcggcccgatcctgtccgttaacacacctaaaatgatccgaaacacagatcctgataagatcggcagagccacgacaaaccctttttcaaaagaagataacccgaaatcctgagaaatataaacgccgagcgcccccagcattacccaaatcataaaactcacatcaaaatataagaaggaacagagcaaagtgagcggatgaccgcttgtttttaattccgacagcttcataacattctcctttccggtcttctatcatttcaaattgctgaatcaagaatatatgaccggcattcaccggaaaagacatgtgtaagataatgcgacacatttaatgcgttaatcaggcaatgtgccataatttctcatagagaagcaatcttacaggcagctgcaaaggaggtttggcgaatgaagaaacaacgattaattgcagcagggaacggaatggccggaatccgctgtattgaacacattttaaagatgaaccgtgacatgtttgagattgtcattttcggaagcgaacctcatcccaattacaatcgcattctcttatcctccgttttacaaggtgaggtttctcttgatgacattacgctgaatagccgcgaatggtacgaaaaaaacggaattacgctttacacgggagaaacggttgtacacattgatacagaacggcaggttgtcacaacggatcgaaagcgcagcatgacttacgatcaaatcatccttgcaacgggctcctctccttatattctccccatacccggagcagataaagaaggtgtgtacggctttcggacaatagaagactgccaatcccttatcaatgcggccggccggtatcaaaaggcggcggtcatcggcgccggtttattaggtcttgaagcggccgtcggcttacggcagctcggcatggacgtcagcgtcattcaccactcttccgccattatgcaaaaacagcttgatcaaacggcatcccgcctgctgcagaaagagctggaacgaaaaggcttagtctttcttttagagaaaggcacggcatccattacagggaactcacgggcggaaggcatccgtttcaaagacggttcttccatagaagcagacctgattgtcatggccgccggtgtgaggcccaatatccgattggctccatctgccggactttcagtgaacaggggaatcatcgtcaatcaattcatgcagacgaacaaaccgaatgtgtatgccgtcggtgaatgcgcggagcatgacgggattgtatacggattggcggcgccgctttatgaacagggaaaagtgctcgcgcagcatctatgcggcgtcccgtgcgaagggtttcaaggctttgcacaatctgcggccttaaaaatagccggtattgatgtatggtcggcaggaaaggtgcacgaggatgagcacacagccggcatattgttccatgatgagcatgcaggcatctacaaaaaagcgctctttgaggacgataaaccggccggctttattttattcggggacacgcgcggtaaacagcggcttctcgacagtcttgtgaagcaaagagatatttccatcgtgaaaaaacagctcatggaaccggatcaaggcggtatatcctttgaatccatgcctccccatgaaaccatttgccaatgcagctcagtgaccaagggctccattgaagaagcggtgaacaaatatggcttaaaaaccgcggaggaagtgaagcacatgacaaaagcgtccggatcttgcggaggatgcaggccgctcgttgaagacttgctgaagtatatggcaagcgatgattacacaaaaccctcctgccagccttcgttttgcggctgcaccgatttgacggaggaagaagtcatcgccgaacttcggcgccgtccgttcactgatgccgccgaggtgatggaagtgatcggctggaaaacagaaaacggctgccgcatttgtattccggcgcttcactattacctggaaaggacgcggcctgattttatgcagttcaatgaaatatcggcagaagagacatgcaccctgattccgcaaatgtacggcggcctgacacgtgcggcagagctcaaaaacatcgcagacgtcatcgaagcatacagcatccccggcgtttcgatgactgacagtcaccggctgaggctttccggaatcaggccaaatgaccttgcaagcatcagaaaagcactgaacatgccggttttctccccccggcaccgcaggacgattcaaatcagagcatgtacgtgcggacagcatcgctcctttcaagagctggcaagcaggattgaacgagataccgacacgcttgccgtccccgcttatatatccgtcagcttgtcatgtgaaaacaattgcaccgatgcttacattcaggatatcggcgcgcttcagacacaaacttgctgggaaatttatatcgggggcgtccgcggaaaacaagcccgcgccggcagccttttttgtgtgacggataacgaagacagtaccgccgctatgatgaaaggccttattcaatattatcgcgaaacggctcactacaacgaagcgatttatcaatgggttgacagactcggcctcgtccatatcagagaaatgctgtttgaagaagatatgcggacacagcttctgaaaaatctccgttcagacatctccctgctgcaaaacctgtctgccgggaaaacgccatacgaaaggatgaagctttttgactgaaccgatgctccgttatttccgtgacaaactgcaagatgtccaatcggaaaaaacatatgagacgcaatgcccgttctgcagcatgcaatgcaaaatgcagcttacggaacaaaccttcgcggcacggaagaaatacactgcaatcggcattgataatccgacgacacatggccgtttatgtacaaaaggcatgaatgcccatcagcatgccgtgcactcttcccgcattacacgccccctgcttaaaaaaaacggtgaatttgtgcctgtctcttgggctgaagcactgaatcgcattaaggaacaaatcaatctgatccaaaccgaacacggcaatgatgcgatggccgtctatgggagcgcctcaattacaaatgaagaagcctatctgcttggaaagttcgcacgggtcggcttacagacgaaatacatcgattacaacgggcggctctgtatgtctgccgcagcaacggcggccggccagacattcggcgcggacaggggcctgacgaatccattatcggacattccgcatacacgtgtcatcatcctggcaggcaccaatatcgccgaatgccagccgacgatcatgccgtattttgataaagcgaaagaaaacggggcttacattatcgccattgatccccgggaaacggcgacgaccaaaatagccgatcttcacctgaaaatcaagcccggtacagacgccgccttggcaaacggactcgtcaaaatctgcattgacgaacagcttacagacaaagactttatccgcacacgaacaaacggattcgataagctcaaacggcataccgacgctttggatctgaaagagatctccgagcagacaagtgttcctttggagcatatacgaaaggccgccgtgaagtttgccaaggaaacatccggcatgctgtttacagcgcgggggatcgaacagcagactgacggtaccgcggcagtgaaagctttcttaaatatggtgctgatcacgggaaaaatcggcaagcccttctcaggttacggggcgattaccggtcaaggcaacggacaaggcgcgagagaacacggccaaaaagcggatcagcttccgggctaccgttctatcgaaattgaagaacaccgggcgcatattgcgaaggtgtgggggattcatcaggatgagctgccgcgaaaaggcgtctcagcctatgaaatgatagaaaaaatagatagcggcgacatcaaaggattgtttctcatgtgttccaatccggctgtttccggcccaaatgcgaatttcgtcaagcaggcaatcaagaaactgagattttttgtcgcagttgacttatttatttctgagaccgcggcattcgcggatgtgattttacccgcctcctcttatttggaagacgaaggcacgatgacaaatgtagaaggccgcgtgacattaagagaagcgagccgcacctgtcccggagaagcgaaacatgattggcagatcatctgtgacattgcctcggctcttggtaaagggcattattttccctatacctcgtcggaggaaatctttaacgaactgagagaagcgagccgcggcggaattgctgattacgcaggcatcacctatgacaggctcaggcgggaaggcggcattcagtggccatgtcctgaagcggatcaccccggaaccgggcgattgtttgagcactcatttgcccatcccgatcacagagctgaattaagcgtgattccaaatgaaccggccgtcccgaaagagaaaccgagcgccggctatccgctttatttaaccacaggaagggtgatgtctcattacttaacgggtgtccaaacgagaaaaagctctgccttggctgcaagacatttcgaatcctttgtggaaatccacccaaaaacggcggccgactatcatatcgaagaccgtgttctcgtgaaagtagaatccccccggggcagcatcacggtccggagcagatggtcggagaaagtacgaaaagacacgttgtttgttcccatccattggtctgacacgcaaaacgtcaacgatttaattggtgaagccttggacccggactgtaaaatgcccggttttaagatgtgcgcggtacgaatcagccctatataatttttcataaaatttttagattttttagtattttttgttacatttcataacatgcatcttaaatatttgtttttgctgtgctacgctaaaaaaaacaaagataaggagcggatcatctgatgggaaaaaaacagctagttcttgttggaaatggaatggccggggtaagagcgattgaagaaatactgcgtgtttcaaaagacgaattcgagattacaatattcggggccgaacctcatcccaactataaccgaatccttctgtcaaaagtgctgcaaggcgataccgacattcaagacattacgttaaacgattggaactggtacaaagaaaacaacattcagctgtataccggtgaaacagtcatcaaagtcgacacggaaaacaaaaccgtcatcaccgatgcagacagaatccagccttacgatgaactcatcctggcgacaggctctgtcccttttatccttccgattccgggcgcagacaaacaaggcgtcacggcattccgggatataaaagatacagacacgatgctcgccgcgtcaaaacaatataaaaaagcagccgtcatcggcggaggactgcttggtttggaagccgcacgcggactgctgaatctcggaatggacgtgtctgtcatccacctcgccccattcctgatggagcgccagcttgacgcagcggcgggacgcctgctgcaaaacgaattagaaaaacaaggcatgacctttttccttgaaaagcaaaccgaagaaattctcggtactgaccgtgtcgaaggcgtacgcttcaaagacggcacaagcatcgaagctgacctggtcgtcatggcggtcggcatccgcccgaatacacagcttggcacagaaagcggcattccggtaaaccgcggaatcattgtcaacgattatatgcagactgacattccgcacatttacgcggtcggtgaatgtgccgagcaccgcggaatcgcatacggtcttgtggcgccgctctatgaacaggcaaaagtgctggccaaacatatttgcggcattgacacaaaaccgtatgaaggctccgttctctccactcaattaaaggtatcaggcgtcgaagtcttctctgccggtgactttaacgaatcagaggacaaaaaagcgattaaagtgttcgatgagcaggacggcatttataaaaaaatcgtcctgaggggcaatcaaattgtcggcgctgttttgttcggcgacagcagcgagggcggccgcctgttttctatgattcaaaaagaagccgatatctccgaaacttccaaaatatcaatcttacagcctcttgatcaggaagcaggcgcaagcatgaccgcggcgatgagcgacgatgaaatcatctgcggatgcaacggcgtttcaaaaggcgcgattattcaagccattcaggaaaaaggctgcacatctacggacgaaatcaaagcatgcaccggggcatcccgttcctgcggaggctgtaaaccgctcgtggaagacattcttcaatatacactgggctcagaatttgacgcgtccgcgcaaaaagaagcgatttgcggctgcacatcactgtcgagagatgaagtcgtagaagaaatcaaagccaaagggctgtcccatacaagagaaatcatgaacgtgctcggttggaaaacgccggagggatgctccaaatgccgtcctgccctcaactactacttaggcatgattaatccggctacatacgaggatgacagaacatcccgttttgtgaacgaacggatgcacgccaatattcaaaaagacggaacatactcagtcgtgccccggatgtacggcggcgtgaccaactctcaggatctccgcaagatcgccgatgtcgtcgacaaatatgagatcccgctcgttaaaatgacaggcggccagcgaattgatctcatcggcgtcaaaaaagaagacctgccgaaagtatgggccgagcttgatatgccttcaggctacgcgtacggaaaaacactccgcacggtaaaaacgtgcgtaggcgaacaattctgccgcttcggcacgcaagactccatggcactgggcattgcgcttgagaaaaaattcgaagggctcaatacgcctcataaggtcaaaatggccgtgtccgcctgcccgcggaactgtgcggaatcaggtattaaagaccttggcgttgtcggcatcgacggaggctgggagctttatgtcggcggaaacggcggaacccatttgcgcgccggtgatttgctgatgaaagtaaaaacgaatgaagaagtcttagaatatgcgggtgcttaccttcagtactacagagaaacggcaaactatctggagcggacatccgcatggcttgagcgcgtcggtttatctcatgtccaatccgtattaaacgatccggaaaaacgtcaggagctcaacgacagaatgaatgagacactctctgtccacaaagatccgtggcaatacttccttaaagataaaaaagcatctaaagatctattcgaaaatgtcgtcacgacttcataaaacagtaagggggaacggacatggttaataaagatatgacaaaggtttgcataggcaaagtaaacgaattacccgaggagttaggaaaaaccgtatatatagaagataaagagcttgccgtatttaaactttctgacgggagcgtccgcgccgtcgaaaaccgctgtccccataaagggggcgtcttggctgaaggcatcgtcagcggagaatacgtcttctgcccgatgcatgactggaaaatctccttagaagacggaaaagtccaagagccggatcatggctgtgtcaaaacatacgaaacactgatcgaaggagagaatgtatacctcctgtattgatcagaccggatcactttttcaagtggtccttcattttttaaattgctgaagggatgacgccatcatgaaaaacggaatcgtatattttgtcggtgccggaccaggagacccggggctgatcaccgtaaaaggaaaacaggctctggagaaagcggatattattttgtatgaccggctcgcaaacccaaagtttcttgagtatgcctcaccggactgccggttcatttattgcggaaagctgcccgaccgccattttatgaaacagtctgagataaatgccctgctgattgaaaaagcggcggagggctacaccgtagtccgcttgaaaggcggagacccaagtgtgttcggcagagtcggcgaagaagcagaggcgcttcatcagcacggcatccgctacgaaatggtgcccggcatcacctcgggaatcgcagcgccgctgtatgcgggagtccccgtcacccatcgtgatttcgcttcgtccttcgcgatgatcaccgctcatgatacatcattgcatggcaggccgaatctcgactgggaagggcttgcccgaagcgttcaaacgcttgtgttttatatgggcgttaaaaatctgtcatttatatgccgtaagcttacggagtacggaaaatccccttccgtccccgtactcgtcattcaatgggggacgtgggggcggcagcggagcgttaaaggaacgcttcaggatatccatgaaaaagttcaaagccaaaacatcaccaaccctgccattatcgtcatcggtgatattgtcaattttcaaacacacagctggtttgaaagcaagccgttcatcgggcggcatatcatggttgtcactcatggcgatgaagaacatacattgacagacaagctgcgcgagtatggcgccgatgttattgagtggccgaagcggatcgttaaaaaaatgcccgcaaacgaaaatatcctgaaacagatcagcacctttgaacaactatttttcacatcacgccttgcggtatgcgaattctttgacacactggctttcaagcagatcgacatccgccgggtgaccgcaagcctgaatgcagcgactgaggccgcaaagacggaactgacaaaccggggctttctcctatccgaatgtcaaattgattctccgcattcactcattgtaggaagccgtcaagcagcagaaaacttgtcagactcaaaatcatgcccgttttatatcacccatgaacatatcgcagatgagcggttcacttccatgatcgaacgcacgatcagcgagtctcctctgcaaatgattatctgtatgggcaaagaatccgctcagcatttgatcagcgccggaaaacaaatcggcatatcaccggatccgtcagcaaaccgccctcccgtcatctgcatgggcgaagacgtccccgccggctgcgggtttaccgccgtgaaaaatcaggaacagttatttgcgtttatacgaaatgaaatgaaagacatgctcgttcacagctgatacgccggaatgcttttctgaccccccagactcaacatcgggggtcagcccttttttattgtgtcaccaattttttatggtgagtcgaatacatcgccatctgatccgcctgcgggtccaaataggctttggcgctgttcacggcggtcggcccctccgtgaaaccgcctgcaatcaatctgagcttgctttcataatgggcggcgtcaccggcgacaaacacgcccggaagattcgtccgcatatgtctgtcagctttaatcctgccttcttctatctcaagcccccagtccttcatcggaccgagatcaattttaaacccatggttgataatgagctcatcaagcttgatgacttcagaaagtccggactcagtttggcaaacggtgacgctctcgatccgttctccggtgccgttgaggtgcttcagacgatatggcgcaagcacccgcacggaagaccgcttcattttcgccacgctgctttccaaaccgccgaactcctccctgcggtgcaagacggtaacagacgccgcaatcggttccagctcattcgcccagtcaaccgcggtatctccccctcctgaaatcacgacatgcttatctcgaaacgcatcaagcttctccaccttataatgaaggttctttcccgaataccggctcgcatccgcgctgtcaagttcattgacctcaagcgtccccatgccgacagccaaaatcaccgtgcgtgtatagtgcttttcccctttggaactttccagcacaatggttccgtcttccagccgttcaaatccggtcacccgctgattcaacacgatatccggcttaaatgtcgcagcctgttccttcagctgcttaatcagctgttctccggcaatcccgggtattccgccgatatcacggatgattttttcagggaaaaacatagacaccttccccccgagccgcggcaaaaactcgatcactttcgttttcagctcgcgcatcccgcaataaaaagccgcaaacaggccgatcgggcctccgcctataatcgtgacgtcatacacctcatgattttccgccatcgttctgcctcccgtttatatctatacttcaacatttttaattgagaatcaatatcaataaaagtataacacacatcgagcagcagtgtttattcatttctctcttgcgggaaaggagtgattcagaagtgaggttctgagattgataagcgggaaggtattaaaactgaaaccagtacggcgactggtttcttttttatctctttttcatcagcatgatatcgagatacagctggcaccttgtcctgaagtcgtttaaattaattgatgtcatgtcaagaatctgtttgatacggtagttcaatgtgttttgatgaataaaaagctgttctgcggctggttttgttttgcagttattgaggagatagatttctaacgttttcagcagttcggtactgctttctctgtctttggcttttaataacgctaaatcatcgtttacatattccagtgaggcgtttttttcttcgatgctttcaagatagcggtaaatcccgagcttactgtattcgtacgggatattttcctggtttccggtaatttcggcggcctttatgacttcaagggcctctatataacttttgccaagcttcaggatgctgctgtattcattgccgattccgatatagatgggagtggggatcttctgaaagtgaaaatgagtcagcagtttgtggatgaattcagatgctgccgaagtgccggagcttttttgcgagaagcttgcgacgacgatgacaatattggaatcaatggttaagacgtgactgattttatcccgcaaattcaagtacgatttgatgttttccttcacatcttcgactgcctccccatccccattcgcggcgtgcaggacgactactgaaaaaaccgacggcagcacggcgttcatcttttccgcttcccgcctgaactccttttcagaggagaattgctgaaagatcgcccgtttcaccaggtcttccgctctctcttctttttcctgtttcagccggttcgttttatagatgatttttccgacatggaatgaagtttcatataaaaaatcgagctcctcgtccgtcaagtttcggtcgagctcctgaatccagatgtagcccatcacttcgcctttatgttttgcgcttacaaccactctctgattcagtccgatactgtctattttttcgacacggaacggttcaggaacggttttcagcttttcgatcaccccgtccttcagaaacctttcaaaaatctgcacggggcatttttttgaaaatatcgtctgctggttggcggagtcgaagtgattaatgtaataagaattataggcaagcaaaaagaaatccgcgctttccagaataacgggcttctgcaattcataactgatgaaatcaattaatttatcaatgtccgtaaatgaaaaaactctctctaaaagctcttccatacctatttctcctatgctctttttatctttatcatactctgcggggtgactttttgtatagaaaaaaattcacatattcccaaaacggcataatccggaattctgtatcgtgaaaagaggaaaaagggcggtcccttcttcctctcgttccttgcttttattgagaaagtgtatcacggtaatcatgaaactgatctgtgacatcttttgacggagcctgtgtcaataagctgacgacaaatacagcggcaaggcttacagcaaagcccggaatgatttcgtacaaaaagtctgaaagaccggcattcgcccaaatgattacggtaatcgctcccgcaatcatgccggcgagtgccccccatttcgtcatccgtttccaaaataaactgagcagtacgaccggcccgaatgaagcgccgaatcccgcccatgcatagctgacaagaccaagtatcgtgttgtttttctcccaggcgagcaccaaagcgatgattgacaccgcaagcactgccattctccccagaaatacgagttccttatcagaagccgaacgcctgaacatggacttatacaagtcctccactaaagaactggacgtaacgagcagctgagacgaaatcgtactcataatggccgctaaaatcgcagaaatgagaaatcccgtaataatcgggtggaacagaatgttgccgagctgaataaaaatggtttccggatcagccagcttcagtccgtgctggtggtaatacgcgattcccgcaagacccgtaaacagcgcgcctagtgcagacaaaatcatccatcccattccgatccgtctggcgcgtttgatttctttcacagatgtgatcgccataaagcgcacaataatatgcggctgcccgaaatagccgagcccccacgcaaataaagaaataatgccaaggacggtcgtccctttgaacatgttaaacagttccgggttgacggaacggatatcggcaacggtttcccccgggccgcccgtatggaaaatcgtcacaatcggcacaagaataagcgccgcaaacataatgatcccttgaacaaagtccgtccagcttaccgccaaaaagcccccgaacaaggtgtaggcgacaacgacgcctgtcacgacccacagtcccgtgtggtaattcaaccctaaaatgctgttgaataagacacctccggataccatgccggatgatacgtaaaatgtgaaaaagacgagaatgacaagacccgaaaacagtctgagaagcttcgtatgatcaccgaaacggttttcaaggaaacccggaatggtgatggaattccccgctttttcggtatacgttctcagtctcggcgccacgaaaagccagttcgcccacgccccgagcacaagcccgatcacaatccaagcgccgcttaatcctgtcgagaacatggcgcccggaagccccatcaagagccatccgctcatatccgccgctcccgcgctgagcgctgtgacggcagggcctaaagaacgccccccaagcatgtaatccgtcagattcgacgtccgtctgtaggcgaaataaccgataaacagcatgcccgccatataaatacaaatggaaataatcaactgaatgtttgctatggcatttcctcctccgctttatatgtttatggtgaaatggacaccccccgcgaggaggatgcccattcagtccctcttaaaacgtttcactgattgttttcgcctgcatgtggagggccaaataatccgggccgcccgcttttgaatcagtgccggacattttgaagcctccgaacggatggtagccgacaatcgctcccgtacaattgcggttgaagtacaggttgccgacatggaactcctgtttcgcccgttcaatatgtttgcggttgtttgtaatgaccgcgcctgtcaaaccatattcagtattgttggccacttctaaagcttcatcaaagtttgacactttagaaaacgccacgacaggcccgaaaatttcttcctgcatgagtcttgctttcggatcaaggtcagcgaagatcgtcggcttgataaagtagccttttgaatcatctccggtgccgccgcttactaaacggccttcttcttttccgatttcaatgtagctcatgatcttgtcgtaagaaccttggtcgatgacaggccccatataaacatctgcactgtcaggtttagcagttacttttgattccgtaatttcaatgacacgctctaatacttgatcatacactttttcatggacaactgcacgtgaacctgcagaacatttttgtcccgcgaagccgaatgctgatgtaaagatggattgagccgccaattcaatgtccgcatcttcgtcaacgacaaccgtatctttaccgcccatttctgcaatgacgcgtttcagatgctgctggcccggctgcactttcgccgcgcgttcgaaaattctcgtaccgacttcacgtgatcccgtaaatgtgataaggcttgttttcggatggtcaacaagataatcgcctacttctgctccgcttcccggcacaaagttgactacgccttttggcaatccggactcttcaagcacctcaacaaattttgctgcaataacaggtgtagcactcgcaggttttagaaccactgtgtttccagtaacgatcggcgccactgttgttcctgccatgatcgcaaacaagaagttccacggcggaataacaactgtcactccagtcggcgtgtacacatattggtttttctcgccctcacggctgttgaccggtttgccttttgccagttcgatcatttggcgtgcataatactccatgaagtcaatcgcttcagccgtatctgcatcagcttcgttccaaggttttcccgcttccttgacgagcagggcggagaattcgtgctttctgcggcggactttggcagctgcgcggaacaaaacggccgctctttcttcaggggatgtgtatctccactcttcgaacgctttcgcagcagcttcaatcgcttgctcagcgtgctcctgggacgcctttgacacttttccgacgacttcttctttatcagccggattgattgaaacgattttcgcttccgtctctaccttttcaccgttgatgacgagcggataatcttttcccagatactcatttaccgtcgcaagcgctttcttaaattcttcaacgttcgattgatcttggaaattcgtgaatggttcgtgtttataaggtgtagtcattgtcatctctcccttttttacttcttagtcattcctttaaaggcgaatgcgatgtttgaggggcgttcagcgagccgtctcatgaaatagccgtaccagtcatccccgtaaggcaggtagactctcatgcggtatccttcttccaccaggctgagctgggtttgcgagcgcatgccgtacagcatctgaaactcaaaacggtcgtttggaatgccgtgctctttggcaagctgttttgtaaactcgatcattttgtcatcatgcgtggcaactgccgtataatgtccttttaaaagctgtttgcggatgagtcttttataattttcatcgacgtcgcttttttcaggataggccaccttttccgattctttataggcccctttgacaagccgcagaaacggattcagcgggctgaggtcatcaagatccttctccgttctgtacagataggcctgcaccacggtgcttacatattcataccggcttcggaagtctttaaagatatccagcgttttctggcatctcgtttcatcttccatgtcaatcgtcaccatgactttatgtttttcagccgtctggaggattttcgtcatattttcatagacgagatcgagatctatatcaagacctaaagacgtcatttttaatgacacttgggaattcagctgttcatcagcgattaaggcgatggtctgcatgcactcctcggtgcgttctttcgcgacatcaccgctgtttacaaattcacccaaatgatcgacagtaactgacagcccctggctgttcaaatgtcggattgtcgggatagaactgcggaaatccattcctccgatgattttgccggctgccacacggcttccccagcttcgcgccatcttattgagaaagctgctcttggataaaaataagaaaaaatctcttgtaatcacttccaaccttaacaccccgcaatctaagaagtatttgtatgagtctattgtaaatggacaaaacatcctctcacaatattctaaaaatacaaagattctgataaatttttgtggttttaccacaatcagcttcttagatagcaggcggattatgccgaaaaaaggcggacggaaatgacggcaatcgtcaatttccgcctttttccccccacgcctcttcgacggtctgaatcaatagccgattcagttcctccgttatgtcaggtttcggcgttttgatcgttttgacatagtgcccgatgcgttctatttctttttctataaatgcatgaatgatcgtatttctcggttccggagccagctcctgaccgctttttttccttgtaagcagtgtattgatttcagaaatgagcgcttcatccgtcaataaggcatcggccagtacgggaaatgacatcggcggtacggagccgaacgtttcaatccatctgcaggcaaggagaggacgcaaaacataaaaatactttttaatcttcacttcactgccccgcaattccgttttttcattccgttttgccatattgagataatgatagatgccggcttcaggcgaaaaggcgcggattttcagttttcgaagcttttcagccgctgagaaagcttcataatagatcatctcagaagagagccattccaaaagaggcggatttgattttttaaaaagccgcagcgcttttctcagttcccagccgctgatgtcaagcatgtcatgaatcggctcttctatgacatccctatgcggttcgatcgaaaagtaccattcttttttcggcacatagagaaaccgcacatcgtagtcgctgtcgcttgacggaaatccccatgcgcggctccctgattctacggcgtaaagcaccttgacgccgtgctgtgcttcaattcgttttaattcttcgatgatcctttgttccatctgtatccgtccttttccgtgatcattcctgaaaaaagcccaagtacttgggcttttcgctatcgtcagcctttcagatgcgctttcagaaaggccagcttttccgtatggaaagaaggtatgtattcatgtccgaaataccggtaaaccttcaattctttttccgtttccagatgattgtacgcggcaaacaccgtcgacggcggggtcacgcggtcaatcagcccgatagacatgagcaccggaacttttacgcggtccgccagattcatgatatcaaaataggccagtgtattcatcgcggccttctccgtttcagggctgccgttctttctgaaaaaggagttaatctcaagatacggctcatcaagagcgacatcaatggcccgctcaaaattgcttaaataaggataatcggccgcaaccgctctcggaatgtcagatagtgccgccgcggcgattgaaagtccgcctccctggctcccgccgatgacggcgatcctcgtttcatccacttcatcaaagccgctgatgacttccaaagcccggacggcgtctaagtacacgccgcggtaataatatgtatctttatctaaaatccctttcgtcatccagccgggaacgtgtccgtgcggtgagacgcttgtatctgtgctgctgtgctggccgcggacaagcatgccgaacgcggcatatccgtgaagcgcccaatttacgatgtcatgtatatccccgtcatagctcgcattatagccgtgatatttcacgatggccggatgcggtccttgccggtcgggaacggcgtaccatccctcaatttccgccttgccgaagcttcggtatgtcagccggaatactttcacgccgtcagccgggtagctttcagccttcaattcaggctttgcctcttcctttgcaagctcatgtaatgatgatgcccaaaaatccgaaaagtcatgaggagcggttttatttggtttataggtttgcagttggtcgagcggcaagtcgtataattgcatatccgattattctcctttgttttataagatttaattttctgactctatcttaacacgattttacactcattttctaaacattttaataaacgtttgtttaaaaacaaaaaagccgtgcgctcacagcgtcacggctctttttacatcggctgatacaagtcccagccgatttttaacgtttctacgatataatcggctatttcttctggttccagattatccgtcgccacttttgaattatgtttatcatagatgctttggcgctcgttaaagagctgctgcatttcatccatggaacggttatgcagaacaggacggctttcaatcagcaggtcagcccgctgcttccaattctcccatgataaatcaagatggagcacgagacagttttcgaggcagcactgtctgatttcctcttgtttaaacgaaccgcccccaagcgacacgatcttgaatttcgtattgcggcagatatctaatatatagtccttttcagtctgacggaaaaaggcttcaccttttttctcaaacatttcagggatggacatattgaaatctttctcaatctgcaaatcaatatcaataaagtctctgtatagtttcttagcgaccagctggccgattgttgtctttccgacacccatgaatccgatcagtacgatatttctttctcttacgggaatggcacgttttgcgttcatcttcggcgaaatcctcctaagaaatgaaaaagttatgtttattatatgataactcaatattgaaatatagagataatgcaatgaaagaaaacccatcctttataagaagagatgagtttttctttctatcggagcttaatgcgttccacctttccgacaatgaaaatataagaaaatgccccgataaatgcgacagcgccgacaaacagaatcgctccgttatatgaaccggtcgcagaaacgataaacccgatgataagcggggtgataataccggccatattggcgaaaaagctaaagacgccccctgccaatccgattgtttcgcttggcgcgacctcactcagcatcgtccaggatatattggacatgccctgcgcaaaagaagcaatggataagatcgtcaaaaccgcgggagcagaatccgtaacattcgcaagcacgatggagcctgtcagcagaagaccgaggatgacgggcgttttccgggcaacgttcaccgacaccccccgtttcatcatgccgtcagaccaaaatccgccgaacaatacgccgaaaaaagcggcgatatacgggattgatgcggcaaagccgacttttaagaaagccatgtgctttgcctccgccagataagtcggaaaccatgtcaaaaagaagaacagcgtggaggctacggcgaattggccgatatacaatccgacaagcttgcggtattttagaagctggacgaaatccgcccacgatatcctgccggctgaatcagacacctcagtcagtccgccgccttctttaatataatcaagctcctcacgattcactttccgatacccgttcggctcgtgatacattttaaaccagaaaatggagaaaacaattccgagcacccctgaggaaataaatacggcgcgccagtcaaatgccgttaacacccagaataaaaccggtgtggcaaacgccagcccgacatattcccccgccgtataaacacccgtcgcaaaggcgcgttcccgccttggaaaccatgtcgtgacaatccggttgtttgccggaaacgccggcgattcagctatgccgatgagcaggcggcagccgaatagaaacccgaaacttgtcgcaaaagcttgtactccggtaaaaaccgaccacacaaataaagaaattccgtatgtccgttttgacccgaatttatccaaaatgagcccgcctggaatctgcatccccgtataggtccagctgaacgcagaaaaaacgatgcccaaaagcgcggggcttaggttcagcgaatgttgaatggatgggccgacaatagatacactggctcggtctatataattaatcgcagtgataaaaaacaaaagaaccaatatcacataacgagcgcgagtcggtttattacggacgggactgaaggccctcagctccgtttcttttttcaatggcttctccccccttactcgaatgaaattaattgtacaacacttcggttaattatttaatactttgacgcaaaaaagcgttaaacaatttgtgtgccgcactgacctgatgcagacacaccccgcttataaaaaagtgtctgcccttttcacctgtttatccgtatcgcacccggggaaaaagtacacatatgatagacagttacgggaggattaccgatgaaactgagtttttgcacgacaggatttaagaaaaagcatattttcgacatcatttctttcgcgaaggagcactcctttgagggaatcgaactgtggtacggacacgctaaacaatatatagaggaaatcggcccgctcgacaggctttatcagcagcttcaggaggaaggcatcggggtgcctgccgtcagtttgtacactgacttcgccactcaggatgaaaggcaggcgttaaaggatgttcaaagggcattaagcgcggcacgacagctgcacagtcccttgatcagagtctttgccggcaatcttccttcgcaccggacgtcaccggaaaagtggcaacgtgcggttgatcaatttcagcaggcggcacggctcgcagatgactatgaagtcgatatcgggcttgagattcattacgatacgtacgcggatacaccggaggcggcgctggcatttttggaggatgtcggacatccgcgggtccgcaccatttttgacggctccaacctacacgtcaatcacgttgaccaaatgtccgctttggaaaaactgtatcataccgtcagccacattcatctgaaaaactatcactggaattttgacaactggtatctcagcaagccaactccgatttttcaaggagatctcgatcaaaaagcatttttaaaagagctgatgaacagacaatatgacggttttgtttctcttgagtattttggggaacatgcctttacgcatataaaggaatcgctccgcgaatatacgtctgttttttcccgctgactcttcgatcgaagggtctttttttgtatcatatagaaaaagggggatatcatgatgatcatttggataaatggggctttcggttccggaaaaacacaaacagcgtttgaactgcacagaagactgaaaccgtcttacatatatgatcctgaaaagatggggtttgcgatgcgttcgatgataccgccggatatcgctgaagatgactttcaaagctaccctctgtggcgggaattcaattacagcatgctttcctatttgtcagatacatatcagggcatcatcattgtgcccatgaccattacgaacgatcaatacttccatgacattatcagcaggctgagacaggatggccggaccattcaccactttactctgctggcttcaaaggaaacattgctgaaacgcctgcgcaccagagcggaaggaaaaaactcctgggccgcaaaacaaatcgaccgctgcatcaacagcctgtctgatagcctcttcacagaacatctccatacagaccaaatgtctattcagcaggtcgcagaaacgatcgctgcccaagcaaatctgcctcttgagcctgattcgagaggaagccttcgaagattcaccgacagattgatggtgaagctgaatcatatccgtatcaaataaaaaaacgttttgaaaacatgtccctgatccatgcaaatggatcaataaataaaaagcccctctgaagggatgttttttcaaattaagaaaaaaattttagaaataaagaaggaattttatggataattatctaattattaacactgtaacacatttcatttgaaaagggagtgctcgaaatgaaattcaaaaaagtgttaaccggttctgcgctgtctcttgccttactgatgtctgccgctcctgcctttgccgcatcaccaacagcatccgcatccgcggaaaatagcccaatctcaacgaaagcagatgccggcattaatgccatcaaactcgttcaaagccctaacggcaacttcgctgcttctttcgttttagatggaacaaaatggattttcaaaagcaaatactatgacagcagcaaagggtattgggtagggatttatgaaagtgtagataaataaaaatgaaataaacaaaaaacctccctttcaaaagggaggtttttttcattctatttccaccaatcatcaaacattgatgccggcacctggcgcttatgctccgtactgagatagcgtttttccagcgcctcaatcacttcggaagaaacgtccttgccttctaaataatcatcaatgtcattgtatgtgatgccgagttcggtctcatcagtctgctgcggtttttcatcaagcagatcggccgtcggtaatttcaaatacaggcgttccggcgcgccgagctcttctaataaacgtctgccctggcgtttcgttaatccggtcagcggcagcagatcagctccgccgtcaccgtatttcgtgaagaaaccggtcaccgcctcggccgcatggtcggttccgatgacaagcagcccctcttgtccgccgatggcatattgagcgatcattctcattctggcctttacatttcctttgttaaagtcagacagctgatcgcccgtgtctttcttatactgatcagcgaacgcgctgacagcggacttaatatcaaatgtccatgatttatcaggtttaatgaatttgagcgccaattgggcgtcatcctcatcctgctgtgtgccgtgcggaagacggacggcgataaattcagcgtttccgccttcttctctgatgctttcagccgccaattgggcgaggcgtcccgcaagcgtggaatcctgccccccgctgatgccgagcacaaagcctttggcacctgtttttttcaaatattgtttcagaaagttcactctgtcctcaatttcttgtttcggatcaattgagggctttacatggagatcattcataatttgtttctggatgctcatcccaatcactcctcctgcattgtttctttatgatccatttcccgttcatgctgaaaatgaatcatgccactatgtacgactctttgttaaatatagcacaggtgcagtttttaagtgaatcaaatacaccgggatcagctgatttccacccgcagcgccgtgatgctgtctccgttgcattttcctttttcaatcggacaggatgaaaacgccacgacgagatccatttccgcacggagccgtacataatcacccgcgtcagaaagaggcgtttcgactgataagttccccttctcatcgagcaccgtgttcataaagatggcaaatgggtaatgcatatgcggccgcggcaccccgaacggttcaagcgccccgctcatattgtcatagcacgtatcctggagctcgtctttatgctttccgtataaaagcctgttcatatccggacggcaggcgggaagcagcaggtcatgcttgccgactgtatcctcaatcagcgtcagcatcggcttgtataaattcgaataaatatgatcacccgtttttacatgaatggactggttggcatcaatcgtcgcgccctgatcaagatgttcataaaagtccttggcatgataagccgtgaagtcagccacctgctgtccttccacatcgactacttttataatctgccctttgtgaaccttcaggccgagcccttttttcggcggtacaataaattgctgtgtcatcagactgctcctttttttcttctattatgaacttcggccgtttgtttcatgtaaagcaatttattggatgtatattccccttctgacggctgcaatctaagctttgataaaggggttgaacttcatgggtaaatcacaggaccagcctaaagggaatctcgcttggtggcagctctccttaatcggcgtcggctgcacaatcgggacgggcttttttctcgggtccagcatcgctattgtcaaaagcggatattccgcgctgatctcatttcttattgccgggcttggcacctattttgtctttgagcagctcgcgaagctttcggccaaacagcccgaaaaggggtctttttgcgcttatgcgagaaaggctttcggcacttgggccggtttcagcaacggatgggtgtactggtcgtccgagatgctgatcactggaagccagctgacagcgatctcgctgtttacgaagcattggtttccgaatgtgccgctgtggattttcgcctccatctatgcggtgctcggtctcttgattatatttacggggctgtccgtttttcaaaaaacggaaaatgtgctcgctgttgtcaagacggcggcgattgttatgtttatcgtcatcgccatattggcgctgtgcggtatattttctcataaaccggatgtgcaggtgccgaacgaatcaaaggatttgttcccgcacggagcgatggggttatggaccggattgatttatgcgttttacgccttcggaggaattgaagtcttggggctgatgaccgtgcatttgaaaaagccggaggaagcctcaaaatcaggccggctgatgcttgccgttcttgcggtgatttacgtcatttctctcggcctggcgctgctgttagtgccgctgggcaaattcaccgaacaggacagcccgtttattacatcgctgaagggttttcatttagatatcattcttgatatttttaacgggatttttattattgcgggattttccacgctcgtcgcctcgctgtttgccgtgacgacattgctttgtacaatggccgatgacggggatgcgccgaaatgcttcagattaaaggaaaacaaaaaaatctgctggcctgcgctcggattgacgtttgccggactcatcgtctccatcatcctgtcattggtgctgccgaaaaatatatatgaacacatgacaaccgcggcgggcctgatgcttctttatacgtggctgttcattttgttctcgggcaagaaactgcttgaaacgacaaagatgggaaccgtacagattgttatcgcccttgtgctgattgtcgcggccgtctccgggacgctgtttgagaaatcgagccggcccggttttctggtcagcctttgttttctcgccgtcattgcgatcgtgacatggatcgtacaaaaaaagcagggacacagccctgccggatcatagcttatttcgtcggtttaaacagtctcttcaaataagaaaagggacactttgacacttgcgtctcatcatcacggaggaaatattgcttccattctaaattgtcttttcctccgtaccaccccaatcggggatgaagaggggcttcatcatacgcctctaagcgttttctgatcagccggctcatgtttcgtccgaacgcggttgaatcatttaatccttcgaaaacccatctcggctgaaacgccagcataaaaaacgggaagcttctgctttgtctcgcttcatgcgcaggcgtcgcgcacagaataaaatacggctcgccgtcaaagcagaactcccatttataatgttcagggtcttccggcatgtcttccggccagtcattcgggtcgcagccgctcagccggtttaaaaaagaccagaacagctcttcatacgcctcaacggaataatgctcagctaaatcctcaggcgtatcaaaaatcacaagcagcgacgcgtatcttccggtatcccttgagatctttccgtactcggacagcagcatccccacttcctccggggttccctcttcgcggggatcacccgcaaaagatatccggagctgatctgtcaaaaatccctgacgtccgggaatgcacggaaacgcgtccgctttatcgcctactttttctgatagaagctcaaaagcgactctctgccaatttggcagatccaataacttttcctcaaggcaactttttgtgtacagcccgcttgtcatcggcccacctccagtatcgtcatgatacgttatgatggagataggcgatgggtgactcttctatttatgagatgagcatttgaatcccctgccatccgaaataaaacccgaaaacgatcaaagacacacccgccgctcctgtcagccagcggagcgctttttcatgaaggagatttctgaaagtgctcgcggcgaccgccatgcagaaatcccagatcaaaatgccgagaagaatgccggagctgtaaatcaaaagctgatttgcatcgaaggattcagcggttttagcgagaatgctcccgtatatgccgagccagaataaaatgctcagcggattggaaagagaaataaaaaatcccgcgccgaatgttttgtaaaaagccggttttccttttccgcttctgacattcatggcttcccttatattttttaacgtttcgactcccgtataggtcagcacgaaaaaaccgaagagccacaaaaacgttttaacgaaaggcgccgtcaaaaattgagacagcccgaaatagatcagaatcatatacagcccgtccgcggccatggcgccaagaccgaaaatccatgcatgccaaaagccgtttttgatgcctttgtcaatttgcgccgcattgaccgggccgacaggtgctgacaatgacagcccgagaacgatgtagcttaaaaagatgttcattggcttccccctcattcatgcaacttgtacaagttattcatgaatgggccgtgctatgatatattattttaatttctcaagctcgtcttccatcatgtccgtcgcttttcctaaaaaatcgaatatcagccgcagttcttcttctttatattgtcggcaaaggctgatcgtggactgggataaggagctgaacaattgcttcacattcgctttcccggccgtcagcggcacgatgatcacccgccgtttgtcttcggggtcttttttcctcatgacatatcccgctttttcgagccggtcaatgagcgccgttaccgaacctgtgctgaggccggtttttttcccaagctcgcctgcggtcatcgggcctgcttcatttaagatatcagctgatttcaaatcggtcggaaacagaccgagagattgagcggccgcctgatgaaaaaggatcgtccttgtggccatcttccggaataactgtatggcggtttcctccgtctcgcttctggtatttcttgttgacaactgacaggcctccctataaaatcaatttatcttgacgatcaagataattttcggcaaatctaatatgatcatagcaaatttaatgatcaaaagtaagtatgggaggaaaaagcatggaacaaacagccgcgaaggacgcctcgacgaagtttgtcgtcatcggtcttttgctgggcattttaatgtcggctatggataatacaatcgttgccactgcgatgggaaatatcgtggcggacctcggaagtttcgataagttcgcgtgggtgacggcatcatacatggtagccgttatggccggtatgccgatttacggaaaactgtccgatatgtacggacgcaaacgtttctttttattcggtcttattcttttcttaatcggatccgcgttatgcggaatcgcccaaacaatggatcagctcattatttaccgcgtcattcagggaatcggcggaggcgcgctgatgccgatcgccttcacgatcatttttgatttatttccgccggaaaaacgcggaaaaatgtcgggcatgttcggtgccgttttcggcctgtccagcgttctcgggccgcttttaggcgcgctcattaccgactccatcagctggcactgggtgttttacatcaacgtgccgatcggtattttatcattgtttttcattcttcgttattataaagaatcccttgaacacaagaagcagaaaatcgactgggccggcgcaatcacgctggtggtttccattgtcggtctgatgttcgctcttgagctcggcggaaaaacatatgattggaactccgtgcagatcatcggtctgttcgctgtgttcgccgtgttctttatcgccttttttattgtggaaagaaaagcggaagaaccgattatctcattttggatgtttaaaaaccgtttatttgctacggcacagattctggcgttcctttacggagccacgttcgtcattttagcggtgtttatcccgatcttcgttcaggctgtgtacggaagcaccgcgacaagcgcgggctttattttgacgccgatgatgatcggctctgttatcggaagtatgatcggcggaattttccagacaaaagtgcggttccgcactttaatgctgatttccgtggtcgctttctttatcggaatgctgctgctttccaatatgacaccggatacggcgcgtacgatgctgacggtattcatgctgatctcaggattcggcgtcggcttcaacttctcactgctgccggctgcgtccatgaacgatctggagccgcgttaccgcggaagcgccaactcaacaaactcgtttttgagatcattcggtatgacgctcggtgtgacgattttcggaaccatccagacgaatgtgtttactaacaagctcacagattcattcagcggcatgaaaggagcgggcggcgcgatgcagaacatcggaaatccgcaggagattttccaggccggcacgcgcgctcatattccgccgcacattctggatcgcattattgacgccatgtcgcaaagcatcacatatgtatttacgcttgcgctggcgccgatcgtcattgcggccgttaccattttgtttatgggaaaagcgagagtaaaaacctctcaggaaatggcgaaaaaagcgaattaaaaaaagcagtatatggcgtttgtcatgtactgcttttttgtttactctgcgaaatgcggagcgagaatatctttcagcacgtttgcgctgcggctgaattgagcctgttctgtttcattcagctcaagttccgtcacacctgcaatgccgttccgattgacgacggccggaacgccgataaagacgtcgtttacaccgtattggccgtccagatatgtgctgacggttaaaatgctgttttcattacgcaaaatcgcttttgtgatacgggcgaggctcatcgccactccgtaatatgtcgcgccttttttctcgataatatggtaggccgcgtttttcacatcgtcaacaatctgatccagctcgtcctgcttgtaagctgtatttttctccagcaattgctgcaccggcactccgccgatattggcgtgactccatacaggaagctcggtatcgccgtgctcgccgataatgtgggcgtgtacgttttgcggagcggctccgaagtattcactcagcatataacggaatcgcgcagaatccagtgtcgtgccgctgccgatgacgcgttctttcggcagcccgctgaatgtccatgtcgcataagtgagaatgtcgaccgggtttgtggcaacgaggaagatgccgtcaaatccgcttgccattacttcaccgacaatgcttttaaaaatggcgagatttttttcgaccagctcaagtctcgtttcgcccggtttttgattggcccctgcacagatgcacacgatatcggcatccttgcaatcctcatatgtgccgtaagacgttttgaccggatgaggcgcaaatgcctttccgtgatttaaatccatgacatctcccatggctttttctctatttacatcaatgatcacaagctcatctgtgatcccttggttaattaacgcaaatgcataactgcttccaacaaaacctgctccgattaatgctactttgttcactcgttcgttcatcatatatgctcatcctccagtgtttcgtggtgtctgtttttatcttgtgaagtatttcacatttatattgtgcaatacttcacaaacttttgcaagagaaaagtttgatttttggacaaaaaaatatcggtgatggtttccggattgttgacaacatcctaaaacggaaccgttttaggatgctgtcatcttttcagcgtgattgaaaacgcgctgtccttttcctaaccgaagtaagggtttgatgtgatgatggctctatccattaatgcggaagataaccgtttaaaccggagttgttatacaaaccattctgcacataatcaaagccgggctggttctggccgggcacttgggcgctgccattgttaaaaatcactttggcgttggccgtatccgcattctcaggcagcgtcagcgtgtacattccatctgcattcttagtcatggctttccccggccacgatccggttaattctatggccctgcctccatcatgtttatagatataagcatttacctggctccaatgatccggattttgatagccaatgatgttggtttgggccgggtcttttttgacaaacgtgtattcttgggttctcgctgcaccctcgccgttcgttccggttaatttgatgttgtatgtcgtgccgattggatcttctttcccgatcgttaatcggtctccatccttaaatgctgtctgctgctcattattgatttggtaaacggcttttgttgttttcgcatttgtacgcagggtgaccgtcagctgatcattgaaagaatggactgcccccgtttggtaattctcaaggaagacatgaggcgcatttccaatgtcgtcaggataaagaacagccgcggatctggcattgatcgtacctgtcagtttgccgtttgctacttgaaatgaaccggcgccggccctattatcatacctgccgtcaggtaatttcgttgaagtattgatggtgacagaagacgatcctgcatttgccagcacaacgccttttgagccgcgctgattcataaagatttggttgttcccattcggattcgagagttcctcaggctgcccggccattacattgtgaaattgattgaccgcagtgatcgcctgatctttaaataaggcgctcccgcgatctcctatttgactttttccgggaaatcttacaccatttcctccgccctcaggtctggaaaagaaaagaggcgtgcttcctgagcgggaaccaatcactgcccagcctaaacgaatatcgtcatcactcatccatgtggactcttcatcatcattggcatacgtatcatgtgattccacccatgtgactaacttgtccgcagacacgtcagatgcataatgggagatattcgacacactcagattacggttctttaaagcggatctgatggaatgcccatagttagaagccgtcacattcatataattcgcataagcagtatctctggacgcgctgtcttgcaggatttctccgtattggaactctgccgatatatttgtgatattcggccaaaattggctgccgtaattcccatcatccggaagctctatatgcttggcggcatcatagcggaatccgtctgctccgtcattcaatgctctttccaagaaacgtttcagatagacctgcacctcagtattctgtgtattccaatcatacagcccaagcaatgaattttgagtgacgtcccatcgatccgaccaatttttaatttgtgtgtttccatgggtccagtttggaatacgcttaatctcgtcagaaatcgcgccataatcgctggtagtatgattgataaccgcatcgacaatgacttttacgccatatttttccgcggctgcacacatgtccttaaattcttgttcagtgcctaagtaacggttgccgatttggtacgatgtcggctgatacagccagtaccagttcctcatgcttttatctccttggttcccttcctttacttggttaatcggagacgtctgaatggctgcatagcccgcatcacgaatatctttcatattttgtgttaacgtattgaacgaccaattccatgcatgaaggatggtcccgtttttgaccgatgacgcggtcaccttattcgatttgtttgcagtttcagcgtttgcagccgccgggcctgacaaaaccaaatgaaacagcaataaaaatccggcgaataacggcagtaaagaggttttgaatcgtttttcaaacatttttgacactccttatttgatttttgaagactgactgcggagtcaaaaattcctcttactctttcttcagctcctttcaactgttgtgaagactggagaattttgttaacgcttacatttcaacttatcacacactctctatcaaagcaacgtgacagagtgaattcaaatctatattcctatcaattaaaaagacttcccgctttcaaacaaaaaaagaaaccacctgtcaagatgatttcttttttatttcttttatcgctcttctgtaagacagcttcacaatgacataccgaagcagaaacagaatgcctccgcagacgataaaaagaaagatcattttcagccaagcaaagaatgtatggggaacccccctgtcgtacatcgtaatcgccgctgccgcaaaagtgaccgcaattgaatctatccgctgctgcttcacccgcttttgcagttcttctttggtgtctattctcggcatgagcattcccgacgctcccgccctgatgcaataataaacaattataatgaagaaaaccgccaagcttccggcccattccctaaacggacagttcagaacaagtccgcgtacgatgatgtcaagcaaagacagtgtgcccacaagcattccgacttctgaccaaatcattcgttctttctctttcacactctcactctttccattcacgtttgaaagtccgttccgacgctgattcatgacttcctcccgtactattaagaatggcttacaactcccattatatcttgccgattcataatgataaaccgaaatatcattgacaaaatgtttaataaggaccccaattgatcaggacgcctatgcagataaacacgaggccgatgacaaaccaaatcagcgccagcggaatcatgaagcgaagccactttacgtacggaatgccgctggcagccagtacggccatcagcacgccggaagtcggattgacacagtttacgacgccttctccgagcatgaccgcttcaaccgcgacctgtctcgtgatgcccatcagatcggcaagcggcgccaagatcggaataaatacgaccgcctcccctgagcccgatgaaatcagaaaatgaagcagggcgctggaaatatacattccgattgcgcctgccatcgggctgaaaccgtgcagcagtgacgctagtccattgactaccgtatcaagcagctttccatgttccaggataacggaaatgcttctcgccattccgacgatcagcgcaccgtaaacgagcccctgacagcctgtaataaacgtttttgcgatatcatttgccgccattcccgcaatcaggcctgacacgattgagataaaaatgaacacggcggccatctctgaatcagaccagccaagagtaagcgcgccgtataaaaagccggcaagcgacaaagccgcaacagccagaatcaatttatggcggacggtaaacgggacatgcttgtcctccggctcagaaacctgcgggagtgaacctgccgccggaaaccaatcgttccccagcagactggcgtcctttgcttttctgagttttctcgtataccgataaatatataaaatagatgataacagaaaacaaatgtagacggcaatccgcaggccgataccggaaaacagcggcagctccgcgatgctttgtgataacccgagcggtgaaggtgataaaatcgtcgcgttaaacccggcatagcagccgatataaatgacggccgctccggccacggcgtcccatttcagcgagcgggcgacgatcaggccgatcggaataaaaccgatcacggaattaacgacgatgccggttgtgccgaggatcgaaaatagagatccgacaatcgcaataaacagcagctgttttgtgcggaacgtactgatgacattactgatcaatccattgatggcgcccgttttctccaaaatcgcaatggtgccgcccgtaaacaggattaaaaaaataatcggcgcggaacttgtcatcccttcctgaatcgcggtaaaaaaagcgatcgggctgacaggagactggtctaaagaatgatagcttcccgggacggcggacgacacactgccctttgtcaccctgtcaaattcccccgcgggaacgatgtacgacgctatcgcgcatagtaaagcgacaatgaacagcagcacataagcatcaggcatcacaaacaatttcttctttttcaatacaggttcggccttcggcacagccataacatcaccatcccgctttaaatttataaactattcagaaaatacagatatgtgctatattatatacagaccgattgcctgttttcaatatcaaaaataaaaaacagacagcttttgaaggaggacttacggcatgaacagactcacagcgcatgaaaagcaagtcattatggatatttttgaccacctgcacgccaatcccgaagtaagctggaaagaatatcaaacaactgaatatctgactgaaaaactgaaagaggccggctgccgaacccgcacgtttgatgattgtaccggtgttgtcggcgaaatcggagaaggctcgcccgttgtggctgtccgggcggatattgacgcgctgtggcaggaagtggacggtgtctttcaggcgaaccattcatgcggacatgattcacatatgacgatggcgctcggcacgatgatgcttttaaagagtcagccgaaacttccgaagggcaccatccgctttatttttcagccggctgaagaaaaaggcggcggagcgctgaaaatgattgaaaaaggcgtactggatgatgttgacttcttatacggcgtgcacgtgcgccccgtacaggaaacggcaaacggccgatgcgcaccgtccattctgcatggctcaagccagcatatagaaggcctgattatcggagaagaagcccacggcgcgagaccgcatctcgggcttaacagtatcgaaatctccgctcttctcgtccaaaaactcagcttcattcatcttgatcccggcatcccgcattccgtgaagatgacaaagcttcaggcaggcggtgagagttccaatatcattccgggaaaagcatcgttcagccttgacctccgcgcacaaacaaatgccgccatggagaaattaaccgccgaaaccgaaagagcctgtgaggcggcgactgccgcattcggcgcaaaaattgaattacaaaaagaacacagcctcccggcagccgagcgaaacaaagaggcggaagccatcatggcatctgcgatcagcggcattctcggagaagaacatgtggatgaacctcttgtgacaaccggaggagaggattttcacttttacgggttaaaggtgccgaacttgaaaacgacgatgctaggcctaggatgcggtctggagccgggacttcaccatccccaaatgacatttgaccgaagcgccatctttactggcgttgagatattaacggccgccgtcctcaaatcgtttgaagcataagaaaagcagcccgttacagggctgcttttcttcgttatttcttcaaatcttcaattgaattgacgtttttcatatactgaggaacgaccagacccatcttgacgcctgtcagactcgttcctacatcttcatatttgcctttatatttagacgcatatgccttatgggtattcggaagccaagcagacaatgacgcatccgcgctgcctgtcgcaatcgcagtccacatcggtcctgcctccacttgcgtcagcttcacgtcatagccgaggtcttgaaatacttttccgattacattcgtacttgcgatttcactgtcccatgccacataagccaggttaattttatcccctttaactttatgggcgccttttgtccattgagccacttggtctttgtgttttttcacatattcagcagcggctttggccggcttttcgccttcttcaacggcaatcatgacttctcccatatcgtcctgcgtccatttgaactggctgagaactttggccgcgttaggctgttccttactgaagccggttcttgtaattgtatgaatctgctcggcagttccgtacgtttttttcggatcatcaaggaacttcagcttgtatctggagaacatccagtgcggcgtccagcccgttacgatgatcggctttttccggtcatatgatttcttcaatgtcgccgtcatggcggcacttgacgccgtgacgacattccagtctttcaatccgtaatccttcacggcctcatccgtcagggccatgatccccgatcccggatcaataccgataatggttttgttcacctggtccgcagccgttgccttaccatcagtctgcgaaccgcaggcagccaaagaaagagccagcgcagcggtaacgccgacaccgatgattttcttaagcatcaggcattccccctgctcttcttcttcactttaatgttttgcgtgatacggtcgagtgtaatcgctacgataacgatcgcgataccagcttccactccgacaccggttttcaactgtgtcacggcgctgtatacttcagaaccgagacccggcgcaccgaccatggccgcgataacgaccattgacaaagcaagcatgatgctttggttaataccggcaagaattgtttttgtggcaagcggaagctgcaccttgaacagacgctgagacgtcgttgaaccgaatgcttccgtcgcttcgatcaaatcagccggaacttgtttaataccgagaaccgtcatgcggatcgtcggaggcatcgcgaaaataacagatgccacgacgcctggcacaaccccgatattaaagaagaaaattgcaggcagcagatatacgaaagcaggcatggtctgcattaaatccagaatcggtgtaacaatgcggcggaccgtttctttctgagacgcccatatgccgatcggaaccccgataataatggaaatcaaaacagatgtgacgacaagcgccaacgtttgcagcatcggcgaccaatagcccaaataatcaataacaaagaatccgattaacgtaaagagtgcaattcctctcgtactgatccaccaagcgagagctgcaaaaataacagtcaataaaatagacgggatgaaacccaaaccgctcacaatcgcgtttacgaaagcggccaaaccgtttgagattccgtcaaagaaacccccgaacgtcatggtaagccagtcaacaaaccggtcaacgatatctgctaacggaattctaggcaatctgtccatttacttcaccccctgaacagaagaatcctgagcttgttcagcagaatcttcaacatttatataatcgttatttcctgaaagcgcgccgattaatgcgccttttacgacaatgcctttcatgcggtccttatcatccgtgacggcgatcggaatattcgcatcagacacgacatcgaaaatttccgtcaagtatgtgctttcatgcacagtcgtaaattcagtatttaaaatatcctgaagcgataagtcggattccaccgcttttttcgcatccgccgcgtgaatgacgccgagaagctgtttctgtttatcaacggcgtaaatagaagaaataccgagattcttcatgagctgcagcgctacacgaggccctttgtcaatccgcacggtttcagcgcgcttcatgatgtgacccgctgtcagaactttggataaatcaacgtcctcaacgaatttctcaacgtattcattggacgggctcatcagaatttcttcaggcgtcccgatctgaacgatgttaccatctttcatcagcacgattctgtcgccgatgcgcaatgcttcatcaagatcatgcgtgataaagatgatcgtcttgccgacagagtcatgaaggtctaaaagctcatcctgcatgtctttgcggatcagcggatcaagcgcactgaaagcttcatccatcagaagaatgtcaggatcattcgtcaatgcgcgcgcaagtccgacacgctgctgcattcctccgctgagctgatcagggaattggtgttcaaagccttcaagaccgacaagtttaagcgaatcaagcgctttttgctcacgctcttttttgtcgacgccttggagctccaaaccgtattccgtattttcaagaatcgttctgtgcggaaacagtgcaaatttttgaaagaccatgctgatttttttccggcgcacttcccggagctggtcttttgacatatttgttatcatgtcaccatcaatataaatatttccggcagtcggttcaataagccggtttaacagccgaactaaagttgatttaccgctccccgatagacccatgatgacaaatatctccccatcatatacatcaaagtttgcttgattgacaccaacggttgatccggtagctttcaggatctcttttttgttttttccgctggacagcatctgaatggctttttttgtctgttttccgaaaaccttagatacattttcgacttttatcttaattggtttctcatccaaattcatattttccctccattataagcaatctttaataccgtaacacgtttgtaataagtcaaacaaacatcataatcccttttattttgtatcattactttaaaaacatccctgtgtcttattttcctctggtatgcttctaaatactctctaatcctccttattgaggataaattataaagtaaatcgggattttatcaggcttgagaacgtttccatcgaatgtgctgcaaactgatttcctatcctttttttacaaaaacaagaattttttcgcgacattgtcccggaaaaagaagttttcccctcctaaaaataaggaatattaaggaaaaatataggtctgtcaacagacagctcactaaaaaaagcaccccaaaagggtgctcattgcgcaagctctgtctgtttcgtttcttttccgagaataataatggtgatgacagcaatcaggatggccgcacaaaagacggcgaaaatcactgtaaacgaaacgttccgggctgcaagcgatccgacgagaagcggaccgaaaatgccgccgattctgccgacggccgcggttgttccggaaccggtcgcgcggatcgctgcagggtactgctccggtgtataggcgtaaagcacgccccatgcgccgagattgaagaaggacagcagcatgccggccgtgagcagcatgcccaatgaatccgcggcaccgaagaaataagcgctgcccgccgttccgagcaaatagatgactaagatggtcttccgccccgctttttcgatcagccacgccgctgagaaatatccgggaagctgggcaagcgtcatcagaaggacgtattcgaagctctcaatcatgctgtagcctttcatcagcatcacgctcggcagccataaaaacatgccgtaataagaaaagacgacgcagaaccaaacgacagacagcagcaccgtcggccggatatacggtttcgtccagacacttcccgcctgcccgcgtatgctttttttctgcggcaatgcctgatgcgccggtgattccggaaggcttctccgcaagtacagcgcataaaatgcggccagcgccgttaagagcagcgcggcctgccagccgaatgacggtatgacaaagtaggaaatcaccgccgcaagaagccagcccgcggcccaaaagctctcaagcagcacgatgatccgtccccgcttttcgggaggggacgcttctgacacgagcgtcgaggcgacaggcagttccccgccaagccccattccgatcagaaaacgcaatatgagaaaaaccgtcaatcccgttgcgaaagcggatatgccgcttccgacagaaaagaataacagcgtgatcataaacacttttttccggccgatcctgtcggccagcattccgaatacaaaggcgcccgctgccataccgatggaattgacgcttccgatccatttcatttgatcgggtgttaaattccaatcagtgtgaagcgcggcgataataaacgataaaattccgacatccatcgcatcaaacagccagcccattccggcaatcgccagaagttttcgcggagtgacggcaggttgtttattcataagcagcacctcaaatcgaaaatgattaccgtataagtttacacctgtctttacacattgtcattatcttttttcgcaaaaaaatcccgcttgccgtaagcaagcggggtgtgtgttaattctttaagactgcggttttaatattatcctgaagctgttgaatccgtttcgcgccgtcttctctgatacgtctgttctcttcctcgatctgtttcgtttcctgcataccgctgacaatcgtattccaagacgtttcaatcgtctcaatgtcaatgctcggacggcctgccatacgggcaatttccacgctttgatttgagatattttcagcgtttcgcttcagcatttcattcgtgcggcggtccagctcgctcattgaatcagccacaagcttttgccgtttgactgtgacagcctgaatgatgccgtttttgaaaatcggaatcgtaatgacgaaagcggaattgattttcccgatgagcttcgtatttccgcgctgaaggaggcggatctgcggcgccgtttgcagcgccaccatccgcgccatatctaaatcatagacacgttcctcaagcgcctgaagcccgtcacgcagcgtatcaagctgcatttgcgcaagctggtttccgcctgccgctttttcttcataagaaggaatgagcgcctgcatttcctcaagcttcatctgcccggcaacgacatacttttcaagctccatgtagtagttaatgttgttttcatacatctcttcaagcgtatggttcgtctttgccatttcatctttgtattttgaaatttcgacgtggattttttcaatttctccgcccagggtgcggtacttttgaaaaatcttttcaatcatgctgttgccgcgtttgaacattttagcgagaaatccttttggttcatcgaaatcatttttgtcaaaacggtccatgatttttccgagctgcgtcagcattgtgcctgaatccgtgacacttgttgttttcatcatatttaagatgcggtcggagaacttcgagatttcaactgccggttcttttccgtactcaagcagctccatttggtttttcacgtcaatctgctgtgaaatgcgctgcacctcagggtcttggcgcagctgcaccctgatgtcatctgctttttgttcagaaatctcttcatttttatcaagaacaagcggattttgattttctgtcatgtttatttactctccctgcttttgcgtaatggttctaaacagctttcttacgagtgacggctccttatattcctgccgaaataccatgtcctccagccaatggacatcaaattggctttcttcaatataatgctcaatgtcttgatggcccggcggattatacaagatgatatcgacgccgaatttatttaaaaacaatagagcggcggcgtcagaacgtgtaagttcgccattttgttccgtatgatataaaacgagtttcggaacggtttgggcgtaatcaaacgtctgaatcaattgcagcagcgaagcgggcaggttcgtcgcctggcggaacaaatagattgcggcgtcccttgcctgctccccgggcaaagccttcagccctgggtttctgcacatgtcagaaatcacattggcgatggcgttctgcacgcctgacgggagatgcttgtactgccagatgttgcttcttttcagcctgtccgcgtcaatcgctccttcttcgttcaaaacctgactgtagtgatactggtagttggctttcagctcttccgtaaacggaaaactgcggatcatgtgtgtctcctgatagtctgcggcggtatggagtctgttccaatattctttcgtatctttggaaacccccatcactttcgcaaaaaggttcggaacggccacccgctccctgtccgctttaaattgcggccggataaacgcccgctccttcgcaatgagaaataactcatcatacgtcgtttttaatgtcacggactgcggggtatgatccctgaactgccaaggcttatacatcatagattcctcatggttcagcacatgctcaatttctttcgttgaccggtaggccgtcgtggacgttctgtccggcttttctttcgggaatggctcaaggccgcctgttgcggggagctttatcacaaagctgagttcctcatccggatcaatcaagctgaacggatcttccgcagccggatgaaacaataggacgtcacagccgatcagcatgagataatagagaaaatagagctggcttttggcagcgtctccataccacaccaccttcggcatctcacgctctatatcggcttgttcgagccatggattcaggtggttcagcgaaaactttgacacatccaagagcacacgccggaaatcgggatgattcagcccgttttcatgccggtccgcaaaggtttccaaaagcgtcataaacgcggttctcagccggcggtgcataagcggatcagcgtgtttggcaagcagcctgcccccatcgagaaacgcgacaaacctggaaaccgaaagccctttctctttttgattgaccgaatggatgtgctgcagcgcctgaaacgtttcaggcgcgatggtcttatccagcgtctcgcttaacacatggatgttttcgtgagaagacagctcgaaaagcttattgtaatactccgtctcatcataaggagtgcccaaaatccggacggcaagacgggtaaacgccagcccgttttcccgctcgtaaccgggacgttccggcagcggccgcatcagaaacgtttcccagtcatcgttttccggctcggcctttcggatcaccaattcttcctgcctcatcattttcctcctttctcttcatgatgatcggtacaaaaaaggaaggaaatgaactctccctccttttttgttttattcttctttagatgcagccgtttgctcctgaacctgcttttgtttgttgaaatagtggataataaacgttaccacaaacgcagcgatgatgattccgaagaacaccacgtgcggcatttcataatcaaaggcgctcgccgccattttcacggcgataatcccgatcagcacaaaagccgtattttcaagctcagggattttatcaattaaaacaaggaatacttttgcgactgtacgcatcatgagaatgccaagcataccgccgatcaagagcacccacactttttccgataccgcaaacgcggccagaatgctgtcaacagagaaggccaaatccattaactcaactgaaacgacagtggcccagaaaattccgaacgtacggaccatccatgaatttttcttcatgccttccgtatcgtcatcaccttctccgatccagaaatgcttaatgacgagccaagccaggtacagcgcgccaagcactttaatccaccagaacttaatgagcagcattccgatcccgataaagataaaacggaaaatatatgccccgaacaatccgtatgttaatgctttcttccgctgtttttcaggcagatgccttaccatcaccgcaagcactaacgcattgtcggccgacagcagcccttccagcagaaccaaggaaccgatcagcccccatgatacagggtcagtcagcacctcaccccacattttccaatcaaaaaaggaagcgtaggtcgacataatatgatgtagaaaatccaagttttttcctcctatttagtaaaacggtaatttcctgcttacacctgcaagccgtaattccggcaaagtgatgccagaccgccggaaaacccgctgccgatggcgttaaacttccactcagccccatggcggtaaagctcacaaacgacaaccgccgtttcaatcgagaagtcttcccctaaatcgaaacgaagcagttcattctggctgttttcatcgacgacgcgcacgaacgcgttcgaaacttgtccgaaattttggccgcgcgcttccgcatcatgaatcgtgacggtgatgccgatcttttcaatatttgcgggtatttttgagaagtcgacgataatttgttcatcgtctccctcgccctcgcccgtccggttgtctcccgtatggatgacgcccccgcttgggtgttccaggttattgtagaaaacaaaatcaagatcatttacacagttgtcatgggcatcgaccagaaaagccgacgcgtcaaggtcaaagtcatgccctccggagtacttgttcgtatcccagcctaagccgattaccgcttttgtaaggccggggttcgtttttgtcagatcaacacgctgtcctttcgccaattgaatagccatgtgccgtctctcccttctgtgtttgatatggttcagccgatttgcaggccgtaatctgttgcaatacgggccagtccgccttggtagcctgagccgatcgcggaaaatttccattcgccgttatgtctgtaaagctcccctgcgataatggctgtttcaattgagaaatcttcagccagatcatagcggatcagctcctcatttgtctcttcattgacaatgcgcacgaacgcgttggaaacttgtccgaagttttggccgcgcgcttccgcttcatgaatcgtgatgacgaatgaaattttgtcaatagccgcgggcactgcgctcaggttgactcttacgctttcgtcatcgccctcgccctggcctgtcaggttgtcgcctgaatgtgcgacagagccgtttccgccttcaagctgattatagaaaatgaaatcatcgggcgacgcgcattttcctgcttcatttaatagaaagacgctggaatctaaatcaaaatcatgtccgccgtcgtatttgtttgtatcccagccaaggccgacaacgactttagaaagacccggatttgttttagtcaaatctactttttgtccttttgccaatgaaattgccatgtgtgcactctcctttttatcgtttaggcgtatcggttaacgatatcgccgatttttgtatcgtttgtgccttctcctactgcggcgaatttccactcgccgtcctggcggtagatttcagccgcgatcaggctcgttctgcctgaatagttatctcttaaattgtaagtcaccagttcttcgcggttagcctgatcaacgacgcggatgaacgcgttttgaatcatgccgaagtcctgttttcgtctgacgcagtcgtaaatattgacgacaaacacaagtttattaatctgagcgggcactttcgccaaatcgatgaggatttgttcatcatcgccgtcgccttcacccgtcaggttgtcacccgtatgtacgacaccgccgcaccggcttttcagattgccgaaatagatgacgtttttgctgtctatcattttatcattttcaagcatcagtacggaagcgtcacagtcgatattggcaccgcctccgccgaacagctttccgaaaaagcccccggatgatacagggtcccagccgagtccgaccagcagttttgacagaccggcttttccttttgttaaatcaatccgctgtcctttttgtaaagagatcgccatatgattcactcctattctgtaagggtgccgctaagcacgccgcaagtgcgcatttttactaaattccgggacaagaatcccggtgtttattaagatatacgtcttttattatatcaaagtttcataaaacataagaatttttggcgaaaaacggcgaaaaatttcttcctatattctccttcgttccggagagaatagagaaaacaaagaaattgacggggacttaacatttttcctatccttgtatcaatacatgtcaggaaaggggcagacgagtgattgatttaagcatacttgatcaggcgcccgtatccaaaggaaacgggccgcacgagacgctccgccgttcagcggagctcgcccgcctcagtgaaggatggggctataagcggtactggtttgccgagcatcacggcacaagagggctcgcaagcgtttcgccggaaattatgatcgctcataccgccgcagccacaacgtccatccgtgtcggatcaggcggcgtgctgctgccgcagtacagcccctataaagtcgcggaaactttccgtcagcttgaggcgctgcacccgaaccggattgaccttggggtcggacgctcaccgggcggcacgacgaaaatccggctcgccctcacagacggggtaaagaaaagcatgaccgagtttaacaggcagcttcaggatttatcatcctttctgacagattcggttccctcggaccatgcttatgcaggaataaaaacagcgcctttgattgaaacagccccgcagctttgggtgctcggcctcggggaaaacagcgccagacgcgccgctcttcaaggtgcgggctatgtcttcggccatttcattaatccggaacgcggggaaaaagcttttcagatctatcgggaccatttccgggcctccgcccatttttccgctcccgcctcgctctgtgccattttcgtcatatgcgcggctacggatgagaaagcggaagaactcgccttaagccaggatttatggcttcttcgtgtcggaaaaggcgccgacagccgcgtgccgagtgtggaagaagcgaaggcttatccatattcgccggaggatcgtaaacagatagaagaaaaccggaagcggatggtgatcggctctcctgccgcagtgaaacgccgtctgcttgaactttctgcgcggtatcagacaaaagagatgatggtgctgtgcaacgtctttgatttcgaagcaaaaaaagagtcatatgagcgtcttgctgatatatttctgtaaaaaaagccgtcaaacggagcagcagatgagactgctgcaccgcttaacggcggttttttcgttcttttccttttttaaacgcattccaaatcccctgcagcgtaaacccgagcagaagcagaatgattaacagtaaagtgattgacggccccggaggcgttccgagctggtacgaagacgtcagccccatgaacacactgaaaagagaaataataatggctgccgcaaacacccatttaaaccctttggcaatacggattgcaaaagccgcgggcagtacgaggagcgcggaaacgagcagcacgccgataatcggaataatgaccgaaatcgccagccccgtcacgatgctgaatgacattgacagcaggtttgtgttaatgcctgatgtcttcgccgtcgcctcgtcaaaagtaagcagatagagcggtctgtttaatataatgaaataaagcagaatcagcagggtaatgcctccgataatatagacctgctgctggctgaccgtgacaagcgatccaaataaatattgatcgatgctcatcgacgcgccgccttttgacaggctgatcagaaacatcgcaaacgacagcccggccgccattaagattgcgatagatacctcggaatatgtacggtacgcccgccgcatgtattcaatgccgatcgctccgatcgtgacgacaacgatgctcgccgccgtaatattggtactgagaaaaaaaccgatggccacgcccgacaatgaaatatgagacagcgtatccgccatcagcgcctgtcttctcagcacgagatatacgcctaatatcggcgccataattccgatcatgcttcccgctagaaaagctcgtcgcatgaattccaagtcaaacatttccatccgcctttttcccccctttcaagccgtatgactttatccagatactgctgtacttcgttttgttcgtgtgtcaccatgacgacagtgcggttgtgatttttcacctgatggtgcataaattcgtagaaaccctgtctgctttcataatcaaccgcggttgtcggctcatcaagcatcagcagatccggattgctcgcaagcattctcgcaatgcagattttctgcttctgtccgccggataaatcgccgattttccggtggcggaaatcccacatttccaccatcttcagcgcgttttccacctcgtggtgatccgtttcgttcaatcgtttaaaccattttcctttcgtataacggcctgattgcacaagctccagaaccgtgcttgggaatcctgcgttaaatgaagaaatctgctgcggaacatagccgattgtcaggcgttttccggctgcgttttttttactgatctcggccgttccttcccaaggtctgagcatgccgagcatgactttcatcagcgtcgattttgacgcgccgttcggtcctgtaatgccgacgaattcgccgcttttgatttccagcgacacgccgtcaagcacgggtgtatgcgaataaccaaaaacgatatcctgtaatgtaacgagattcatgctgaccttcctttcccgcatagaaatagtgtgcaccccgcggcgcacactatgttatttaaccaatagcgaatctttcagtgcatcaaggtttttctccataatgtcgatataaccgatgcctttatcccgttctttttggcttaaaccttccagtgtattgagcacttccgttttcgcgccgatttcactggcaagcgtatctgcaactttaggcgatgcaacttcttcaaagtagatgatcttcacatcatgctgtttggcaaacgttttgagatccgccagtttggccgcactcggctcttcttcaggagaaaggcctgcaatcgcaacttgttttaagccgtattctttggcgagatagctgaatgccgcgtgctgtgtgatcaattcttttttcgccgctttatttaatgttgtacggtatagtttatcaagatcctgcagttttgcaatatattctttactatttttctcatagtatgctttattcttcgggtcctgttttacaatctgcgccgtaatggttttgacctctttttgcgcaagaaccgggctgagccacacgtgagggtccatgctgtggctgtggtcatgaccgccgtgtccatgttcctcttcctcttcatccgaaccttcgagtaagtcaattcctttcgacgcctttacaaacttcgcatgatcagagcccatgcttttttccgctgaaggaacccatgtctccatatattcgctgttgtatacgaaaagatcggcgttttgaatgccggcgatatccttcggcgtcggctcccaatcatggggttcgaccgaagacgggatgagaatgtctacatcgcctttgtctttgacaatttgtttcgtgaattcgtacataggataaaaggtcgtcacgacgtgcagtttgccgctttttgaagaacctgacgaaccttttgaagatgaattgccgcagcccgccgcaattaaaaagcatgccgcaatgacaatgattccgctccattttttaaacaagccgtttccccctgttctgtaaatcagaatgataacgatttccaaagcgtactttctcgttcatttgttacctataccataataaaacgaagtaattacgttttgcaagatatttttttctaaattgatatccaatttacctaaaaagcccccgccatgtatggacgggggcgtcctatcacatatcaggcaagcagataaactcttgtttcgtatgggcggaatgtgatgcgggattccgtgccgctgtcattatcatagttgctgagaagcagctcggccctttcaggttcggaaccgtccggccaataaaaagcggcttcttctttcgatacgttgctgatggacatgagtttttgtccgtttgcctgtcgttcatacacaaacagctgcgggtcatcagggagcagcagcgtgtagctgccttttatgatatcagcatactgttttcgcaggcggatcagttttttgtaaaagttcaatatagaatcgggatcatcctgagcctcggccgcattgacggttttgtaattgggattgaccgcgagccacggttcgccctccgtaaatccggcattcttgctgccgtcccactgcatcggtgtacgggcatggtcccggcttttcgccataatggacgccatgacttcttccctgttccggcccatttcaaatacccttttatgatacatattgatggtctgaatatcttgataatcctctattctgtcaaacggagcgtttgtcatgccgatttcttccccctggtaaatgtacggcgtgcctttcatgaaataaagcagggcggcaagcattttggcggatgctttgcggtatgtgccttcgtctccgaaacgggatacgatccggggctggtcatgattgcaccaatacagcgtattccagccttgatgttccagtttttcctgccagtctgtgagcactttcttcaaatcggacagctcaagcggttttacatcccaatgctcttggcccggcttttgatcaagctccatatgctgaaaatgaaaaatcatattcagttcatgctcatcggttcccgtgtagaccagcccttcctcaggcgtcactgatccggcctcgccgaccgacatcacgtcatatttggaaaatacctctttcgtcatttcttttaagtaatcatgtatccgtgccccgtttggccggaaaggcttcggatcggcccgccgggcgatgtaatcttcatatggcggcaaatattctttttttgacagaagatgaagctggtctattcgcaatccgtatacgcctttatcgagccaaaatctcatcatctcgtatactgcttgccgaacctcgggattttcccaattcagatcggcttgtttgacggcgttcatatgcaggtaatattcgcccgtatgttcttcgtactgccagacggattgtccgtaatccgacacccaatcggtcggcgggccgtccgcggtgcccggccgccaaatataataatcgcggtatttgctgtccggattcatttccgcctctttgaaccaaggatgctccgtggaggtatgatttaagacgaaatccatcacaagctttaatccgcggctgcggcattctgtaagcagatcgtgaaagtcctccatcgttccgtaagattccataatcgcttgatgatccgtcacatcgtagccgttatcgacgtttggcgacgggtaaatcgggcagatccatatcacatcagcgccaagttcttttatataatcgagacgcgcgataatcccccgcaggtcgcctataccgtcgccgttcgtatcttgaaagcttcgcggatagatttgatagacaacggcgtctttccaccagtcattcgccatcttgcggccctcctgttttttagagaaccatttcctttatgatccttccctaaacaaaaaagagaaggtttccccttctcttttatctgtccagctgagacggataaagcgtcatgcctccgtcgacgaaaagtgtcgttccggttacgtaactcgcttcttccgacaccatccatgtggcggccgcggcgacttcttccggttttccgaaggcgttcatcggaatttttttcagctgggcctgtttatgtgtttcatcttccagatccttattggactccgtggcgatcgtgccgggagcgatggcattcacccggatgcctttgtctgcgtaattgagcgccatcgtttccgtcatcattttgatcccgcctttggatgccgagtactgcacgttttcaggacggggtatttgctgatgaacgctcgatatgtttaagaccgttccttttttgccgcgctcaagcatatgtttcagtgccgctttcgcccccaaaaaggtgccggtcacgttgacgtcgatgaccctttgccaatcctccaggctcatttcatggggcatcgcttcggccccgttaaagccggaattgttgaccatcacgtccacacccccgaaatgctcctgggcggcatcaaacagcgcctgaatcccttcttctgaggatacatcggcttttacggtgacggctctgcctcccgctttctcaatgatgtccgccgcttcttccgctccggcggaatcaccgaggtagttcacaaccacattcatccgctccttgccgaagcgttcggcaatggcttttccgattcctttcgaagaacctgttacgatcgctgtttttccctgtaaatcctgatacattgtctcttttcctccctgatgttaatacagagcatgtacccggttttgatcggccgaaaacaaaagagatcataaaaagaacgatgaagccgaagctccctcgttctttttttcattatgcgtagttgttcatttgcagccttttttgcacgccgacaagcctgctgaaaaaataagatgccgctttgtagttctcccgtttatgaaagaaatgagccgcgtcctgaagcagttcctctgtgtcagccaacagctcttttgattccagaatgtcaaaatactctttgagcgaatcctgtccgccttccccctgataaagctctttaatcagacggaatttcgtcatatagatctcatcttcccactccgccgcgcttctcatgccccgcgcgcagctggcggcggcttcactgtatttttccgttttaaagtagatatgcgtgagtgaaaaaacagcctggatgacctgccggaagctgtgtgcttcaaatccggcagccgcccgttcaaaatcctccgccgccttgcaaaagtcacccagactgtacatacagtgcccgatattataataggccgcagcaatcatatattgatcatcaagccgctccgcgtgttccaaggcgcattcgaggtattccagcgcttttttatgctgctgggcgtccatcagatttccggcaatgataaatttgcactgcacccttctcattccgtataattcatatttcttgtaaatatcaagcgcctgtcccgcgtaattcatcgaaaagaaagtctgcttgatatgatagtacacctcagaaattttatacagaaactcggctttctctatgtcatcttccacatattcaagcttttcctcagcccgcttataatgagaaatcgctgagatgaagtttttctgcttaaattcatacattcccctgaaatagtaaaaataatattccagtaagccggtcagcttttgctggttcatctcaatctcagtgagcatttcagagaacggaggctggcagtcgccgtctttcatgggttttaatttatccagcatgatgcggtgccgaaattccatcaatgaaaaatacaacaataaatcctggttctcttccatatcttcgagttcatattgaatctcccgcttcagcgcttcagcttgatcggcttcaaacgcgcggatcagcttataccattcattcatctttacggccacttcttcagatggaatcttggatttcatagatttgcctccttcctccggctactaattatgttatattttatcatagcaaatttatggcagtgagcaaacaaagattttaatcaattaaagaaagagagaattcaccatgaaacgaccagtcagaattgcgctgcttttgatcctcttcttttccgcagacctatgtttttcctatgtgcagaaagaattgaggccgcagacggcattacaagacagagccattccaagcgctcttcatccgctcgtgaaacagaatgcggagctattgcagacggccgctctgaacaaaggcatcaccgtcgttatcacagagggtttcagatcaattgaggaacaaaacgaattgtaccgtcaaggacgttcaaaaaaaggaaatatcgtcacctacgcaaaaggcggggaatcttaccacaattacggccttgcgatcgacttcgccctgcaaaaaaaggatggaagcctgatttgggatatgacgtacgacggaaaccgaaacggcacgcccgattggcttgaggtcgtatcgattgccaaaacgctcggttttgattggggaggcgattggagaggctttaaagattatcctcatttacaaatgatccctggctaataaaaccttttcttttttcgcttttgcgcatcaatgtacggaggatagacaggcctgtacacaagcttatatccttcattgccggacggcgtaaaatcgcgctgccactccagccgcagatggaaatcggataaaaaagcggcctttgcttcttcgggagtaacggccggcaccggattgatcttttccagctgctccgggtcaatgtcaggcgccatgtaagcttccacaagccccgttacgggactgacaagtattctcgcagcgccgaaccgcagcggaatatcctgatgccatatggaaaaatggaagcggaacctgccccttccgtccgttttcaccgggttcattttaaaaaactcgtccgctctcggataaagtttgtataaaaattgaagcgcgacggcctcacactcttccgcagaataaaaggccgggccctgatgctcaataaaagatttaaaggctgtcattttccctgtctttttgtccgttttcatcttcattgtatttttgttgctgctttcaaaatagctttcgatactcaaatctttccgttccggaaccgatcctttccgccatgtcgttccgatctcatccccgagatcgcgccggcgcgtctgaaccatatccgaggtaaaccccattaattcatccaggctgatttcccgtttatgttcaaacgcgggaagcggttttgccggctcattcctgtcttcgcaaagctgctgatccggcacgatatcatcttcaccggccggatagctgtaagccggcagaatcggttcatagacgagacgcggtattttctcaaaattgaccacatcatagacgagactgaatgtcagcacactcatgtaatgcgagacgactttttcccgatcgacgaatgtttccgggacgggcgcttcacccttatccccgtaatagataaactgcacgacgaagccgctcctggttacatcaacgaaaaaacctgaatcgggaagcggccggccgagcactttttttgtatagataaatcggatgcacccattgcgttcttccctcgcctgaaagatgaaattcataaaagttagcgggcggtgtctcgccgcaaaccgaagagccgtcagctttaattcggcgtctgacagctgcatgtctgaactcggacagtcgttgcgtgaataggtaagcaaagatccgtcgtcgcccagctcaatcgtgaccgttttatccggatggttacgatctttccatatataataggctttcgttttttgtttttcatcataatcttctatttcaagctcatagtccggcggtatgttcccgatttccagcgctttttttctcagatgttctttcagcaatggggtcatcctttcagaagagtgtataaaaaagaactgttttttattatataaaaacgtccttatccttttaaagggaagaaagtgccttttatgtgtctatttttagcaaagagggaaaagagccgtattcagagcggcactttttcatacaaatgtcacattccccgcgaaagccccgggacgaacgtccatgaccttcagcctattaaactcgtgatcgcttcccctatatgagcctcaataaaccgcgggaaaaccggcttgtatacgagcctgtacacttttccgcaactgtcggcatcgtaacaacgatcccaagcgagctcggctttgatggcccggcggatcgcgtccttcgcctcttccattgtcaatgaaggaacgggatcgatttcctggagctctttcggatcaatttccggcggcatataaaaagtgacaagacccgtctttttgctgacacagattctcccctctccgaatcgcaaatcaacgccgcccgaacaagccttatatgtaagtcccacgttttctccttcatcatccggctcatcatattgaacccggaaatactgatccgcttccggaaacatggcgaataaaaagcggatggccatgtgatggcattcttcctcggaaaacaccgtttcgccttcaacttttataaatgacatcaccccggtgagccggcccgattctttatcataccttgttttcaatacgtgttcattccgttctttaaacagactttcaaagcttttatcttcccgtacggattttgttttttcaggacgccaggcaacgccgatacagccctctccaagatcgctttccctctctttataaaaaccgtcgtgcagcccgatcatgtcattgatgctcttcttttccgcttcaggtgcagggcgtgaaatcgggacatacggccgcgtgtcatcttccagctcttcatattcgtctaattccacattttcttccttcaggtcggccgatatcggccgcgtcggagacacgatttcatagacgagatggggcttgtcatccccctgcacatagacggactgatgcaggacggtgaacaacagctctgcttcaatatgtttgacaaagtgagccaatgcttcccgcttgtccgcaattgtctccggtcttaacagatcatcggccttcccatggtaagaaaagccggttacttcccctgtcacagccaggtcgatgtaaaacccggtcagcggaagcggcagaccgtcagccatctgaacataggaatatctcacatcgccatcatttgcgggtccgtttttttccggttcaaactcagccaatgcccccggacgatgggtttctaaaaacgcccgcatccgtttttctatgtccgattccgaaagaggcggcagatcagtctggaaagccggacgggataagtatttcagttttccgtcccggtctaattcgaccatgatgccggcttccggatcattcttatcttcccaccaaaacagaacctcatcttcccggtattcttccacattactctcgtagcgggcaggtacgtctccgattcggagagccagctgtttcaactcttcttttttcatcataacacttccttttcttccaaaaagattgatgattaccaagactcttttatacaaaactagtataattaacctgtccatcttcatgactatcgaattaatcattaacaacagggggtaaaccagatgtccatcaaaaaaatgagcgccgtgtttttcattctgcttctcacggcatttaccgccgcatgcagcagcgaaacgagcggcggccaggaaagcagcacggcgaaagtgaaaataaaagagacggcatgggccgcttcaaacgatactgaacatccggccgcgctgaaagtaacggtcaccgtcaaaaatacgggcaaagacccgcttaccgtcaaaagcagcgacttctcactttatcaggatgacgcgaaaacagccaaggccgataaggaagacttgatgcagagcggcacgcttcatgcgggtaagacagtgacgggcaatctgtacttcacggctgacgaaggcaaatcctatgaattggtatatcagccgcaggcaaaagacgcgaagcctttatcttataaactgaaagtcaaaggcacagcctccaacgcaaaacctgacccggcggacgcattatccgcatacattgatgtgatgctgtacggcaagcacaataaagatttcacccgcctgaccggtgtaaatgaaaaaatgacggccgccgcatatcaggaatcggcgaaagccagctttatcgcttctgcaggtatatcacaagaacaggcggattcaaaagccatttccgctattattgacgccatgtcatcagcgcttcgggataacacagagctcaaggtgcataccaagtccatgtcaggcaaaaaagccgtccttgaagcaaaagtgacgccgcttgatatgtctccgcttgcgggccagctgcaagaccgcgtgcaagactatgccggaaagcaccctgatgctgatgaaaacgaaattgtcagccacctgctttctgtctatccggaagagtttatgcgcctcaaaccggcttcttcttccgttacaagagaaatcgagatgaagaaaaacgcccgcggccagtggtatctggatacagacgccgatctggaaggattgacagaagcgtttttgaaaacgtcctgacaacaagaaaggaaatagcgcaggctatttcctttttttattttcacttaaagatgtcattgatatattgaacctcatcctcggttaactgcacatgaagcgcgtccagattgtgtttcagctggtcggggcgtttggctccgggaatgatcgcatccaccgccggctgcgacagaagccatgcgagtgcgatatgcgctgtctgcgcccctttttcctccgcaacggcccgaagcttatccactcgctccagattttggtgaaaagcttctccctgaaacggcggcctgttctttcggttgtcctcaaagactgtgtcttttgtaaactttcccgtcagcaagccggaagcaagcggaaaataaggaataaaggaaatgccgttcttttcacaataaggcagcagatcatgctccgcctcacgctgaatcagtgaatattccgattgaaaaacctctaaatagccgtcggcgttaaactcctgcaattgccggaagctgagattggacgcgccgattgctctgattttcccttcgtccttcagttcttttagcgtgcccgccacttcggagagcggtgttttgccgtcagggaagtggacgtaatacaaatcaatcacgtctgttttcagccgcttcaggctgttttccgcctcactccggagaaattcacggctgttgtccagctcgatttgtccgttgacttctttatgcgcgccttttgacgcaatcacgaggctgtcccgcacgccgcgctctgcgacaacttcaccgattaactcttcggaacgccccaaaccgtatataaacgccgtatcaataaaattgacgccgccgtccaatgctgtgcggatgagttcttttcccgtttcatcattaagattcggaaacagattatgtcctccgaccgcatttgcgccaaaaccgatacgctttacccgtaaatccgtcctgcccagcgtacgtgtctcatccatggctcaggctcccttccttttatcgctctgtttagtattagatagacggtaagaattatcctgcctgagagcctatctgcaaaaaaaaccttgaaaagcgtttgcccttcaaggtttttttggctgtgtattaagatgtcagagctgcggcgaagcgttcggcttcatccgtgagagcaccctcgatttccttatagcggctggaaatcgttgaggcgctgacgccgtacttcttcgccagcttggcttgagaaacggacgcgccgttcagagaaatgctgtttacgtaatattcgaccgccgccgcgaaagcttcaggctttctgatcgtcggtgtttttttgatacagaacgttttccacagatcaattacggccggaaccagctcagccgggtattcatccccgctcaggcctttttcaatagcgtctgccgtttccttttccatgtcgttggcccactctgtctgtttttcttcagcagcctgctcaggctcttccgccgttcctaaaagagcggccagcacaatgtcgaagttgtcctgcataaagcgctcaggcgattttccttccgcaagagccggggcagccgcctttttcactttgctgattagagcttcggtccgcttcacagggaagatcgtaaattgcatgaagaactccgctttttccgcttcgtggatcggatagccgagaatcaggcttcccgccggcggaagatcctgctggctgacgtccatttccactttgaattgttttttcgtcatcacatcttcaaagtgaatcattccttctttcacatcttcaagcaccataacggcaggtgtcatgcttttccatgattcaacgatttcccgtgttttcgggcggttgatgccgccggcttttttctgaagatattcttcaaaaatcgtcttgccgcctgccagcggacggaagaaaattccccagatgccgaggttgaagactccgatgtcttttgtctgtctgtccagctccgtaatgaacgcgtgctggttaataaatgatgatatgccgtctctatgtgctgtaaaggcgtactccattaggctttcctgaatctgtttcgcttcttttgccgcgatgtctgccggaatggcagcttctttgcttccgcagcattttttatatttcttcccgctgccgcatgggcaaggggcatttcttttcacttttcccacaataaaccctccgaattctgatataactttattattttaacaaaaataacttcagagggcttggtttacggcgaaaaaagaatatggaagaaaaaaagaccccgggatattctcattctccggggctttgaaactgttaatttgtattttgtccgccgccgttcagaccttctttaatcagcccgtttacttggctgttcatcaaaagtccgatgtgtccgacaccgtgaatctgcacgtttttcccgccgatcagccgtgacagcgggttcaggacgattaagtccgctgagctgtaaatcgatgtatataaaatcttttggttcggatcagtccccggaagcgcccggttggtcacaaggccgttcgctccgcccagtgtgacgacgtttgcgattttgtctccgccgtcaagatttttaatgtaatagagcgtgttggcgccgcccatgctgtgcgcgacgatatcgacttttttcgcacctgtttcgctgagcacttttttcacgtaattggacagtctcggtgcattgtgtctgttgtttccggttttgtccagaaaatcaatggcgtacatctcatttcttgaccagccttgggatgccaagtacgttttgattcccgcgaagttaaaggacgccccgccgattccgtggaccatgacaaccgggttatgctctgaggaggctttcgatacggtcggctggaaggcaaatacggaaatgacggagagcatgcagactgtaaggatcgctaggattttgcttttgatttgtttcatgaactttcctcctgttatgtaattttttgcaattttcattttattagagaagaaaaggaaaaaatagagtattttttactgttttcaacaattgaaaaagaggcggaaaaatgagaaagacgcccctttcccgaaagcacacttatactttaatacggcaaacaaaaaaaggagagaacacccggttctcttctcctagtactcattgaaataggtttgaatccgcttagggtcatgcgtttttgtcagcgcgagcatcagcagaatccgcgctttttgagggttgagagagtttgaagctgtcaaatggtctttttcatactctcgattaggtgttaccgttccgtttcccgtccttgtggagcggacgaccgccagcccgcttttgaccgactttacggcgcctttatgcgccgcatcagacattgagccgtttcccgggcctgcaaaaataatgccttgcgcccctgattttacggcagcttcaaagagatagcttccgtcattttgatagccgtatataatatcgacttgcggcagtttatcaagtttgtctatcttgaaatctgtatccttcgtatgctttcgggtcatgatgttattaaaatagatgtcatcagcaattgttccgatataacccatttcttccgatttgaatgtgtcggccgcggttgtattggtttttgtcacatagcgcgccgaagcgattctgtcatttaatacgacaagcgtccccttacctttcgcatcaggcgcagccgctgtttttacagcgttatataagttggacggcccgtctgctccgatcgccgtggacggcctcattgacccggcgacaacaacgggcttgtcacttttgaccgtcagattgagaaagtaggcggtttcctcaagtgtgtctgttccatgtgtaatgacaatgccgtctgtatcatcagacttgagcagcttgtttacccgttttgcaagtttcagcagtgtctcgttattcatattctggctgccgatattcacaacctgttctccgctcacatgcgcgacctcttttatctccggaacggcctgaatcagggcatcaactccgattgcccccgccgtgtactccgtagctgacgtctttgaaggagcagcgcctgcaattgtgccgccggtggcaagaattttaacattcggaagtccgtcttttttcgctgaggctgcggctgccatccggggcggtgtttctttcgcttgaggagattgggagcagccggccgcgatgaagagcagagccgtgataaatgtaatgaagggcatgaattgttttttcattcttttctctccttttctttatttatgaagattttcctctcaccggtcaacgcgcttgtcaggcaacctcccgaagaaaataaccgttaaaaaaccttgacaccgtcatgtgaaatcaagataatagaccagtcactatattttaaatttgtcaaaaatcagtaaggtgggaacattatgagctatggagattctcgtgaaaaaatcctcgccgcggcaaccaggctgtttcagcttcaggggtattacggcacggggctgaatcagattattaaagaaagcggtgcgccgaaaggttctctttactatcattttccggacggcaaagagcagctcgccattgaggctgtcaatgaaatgagccattatatccgtatgaaaataaaagaaagccttgatgcccatcctgatcctgcggaaagcattcaagcgtttttacaggacttatcaagccaattcacatgtccggaaaactttgaagggtttcctgtcggtttactggctgccgagactgctttaaagagcgaaaagctccagcaggcctgtcaaagcgcttatcaggaatgggagaatctgttcgcgggcaaattgagatcagccggtttttctgatgagaaagcggcggaaatcagcactgttttaaatgccatgatagaaggcggcatcattgtgtccttagccaaaaaagacaaaatgccgatcctccatatttctaaacaaatcccgaacctgctgaagacataaaatacgagagacatgtacgtatagaaagagaggagaatgattttggaaaacgctcagccttccaaacaatataaagtcatgccgatcatgatttctttactgacggcagggtttatcggcatgttcagtgaaacggcgctgaatatcgccctgactgacctgatgaaggagttacatatcactcctgcgaccgtccagtggctgacgacgggctatctgctcgttctcggtattcttgtcccggtatcgggtctgcttttgcaatggtttacgacgagacagctgtttatcgtttcactcgctttttccattatcggcacgctgattgcagcgcttgcaccgagctttccgtttcttttggcggcaagaatcgtgcaggctttaggaaccgggctgctgctgccgctgatgtttaatacgatcctcgtcatcttcccgccgcataagcgcggagcggcgatggggacgatcgggcttgtcatcatgttcgctcctgcgatcggtccgacattttcagggcttgtgttagagcatttgaactggcattggattttctggatttccctgccgtttcttgtgttggctcttttattcggcatcgcctacatgcagaacgtgtctgacattacaaaaccgaaaattgacgtgctttccattattctgtctacaatcgggtttggcggcaccgtattcggattcagcaatgcgggcgaaggatcagacggctggtcaagcccgacggttatcggttcgctcactgtcggtgcgatcgcgctcatcttattttccatcaggcagctgacaatgaagcagccgatgatgaatctgcgcgctttccgctatccgatgtttgttctcggtgtcgtgattgtgtttatctgtatgatggttatcttatcgacaatgctcctcttgcctatgtatttacaaagcggactgatgctgacggcgtttacgtccgggctcatcctgctgccgggcggtattttaaacggctttatgtctccggtgacggggcgcctgtttgacaaatacggaccgaagtggcttgtcattcccgggtttgtcatcacggccgccgtactttggtttttctcaaacattaccggcacttcaacggccattctcatcgtcgtgctccacacatgcttgatgatcggcatttccatgatcatgatgccggcgcaaacgaatggcttaaaccagctgccgccggaattttacccggacggaacggccattatgaatacgctccagcagatggccggcgcaatcggcactgcggtggcggtcagcatcatggcagccgggcagaagaattatatgagcaccgtgaaaaacccgaatgatccttccgcatactctcacgcgctgattgcgggcgtccagcacgcctttatcttcgcgatgattgtcgccgttatcggcttgatcagcgctttctttatgaaacgggtcaaagtgaatcactcataagaaaacagcaggctccccgtgagtctgctgtttttttatatatcgcgcgcttcagccagttcatcaatcgcatacatcagatcatcggccgtgttatagaaatgaggcgccagccggatgatatgtccgctgggtgcgcatacgatgtttttccgcctcaacagcgcagccgtttccgccgctttttcatcccgtatggaaatcatgccgggtctgtcatcggcagacggcggccctgtgagattcaatcctttttcagaagcgtattcatacgcaaatgcactgagtttttttacttcttggtgaatgcggtctgtgccggcatcgtttactagagataaagccgcctgtgccgcatatatgctgataaatgccggggttccggtctcaaagcgtttggctccgtccgcataagaaaaacgggttaaatccagcatcgacgcccgctgctgcccgaaccacccggtgactttcggcttcagccgttcggcaagttcctttctgacataaagaaacgccgttcccggtatgccgagcatatactttctcgcacccgcggccagcatatcaactccccattcttttacatcaatcgggatgtgccccgctgattgataagcatcgacaaaaagaagcgatcccttctttgcggatatctcggcaatgcgcttcatatcctggacaaaaccggacgtatatgacacatggggcacacaggtgaaaagcgtctgttccgatatgtacgtctcataccgctctaacgggatcattccatcttcagacggcacgactgaaagctccatctcagtctgtgccttcaaaatgtgggcgatcgccggaaaatccaattccgtatacaccgcctgtttctttcggcaatccggtaaagcggaaacgacggcagagacagcagccgttactgaaggtaaaacggcgatttcttcaggatgggcgccgatcaatttcgcaaattcacaccttgcctgctccgttcgtccaatggcttcttcccagtttcctccatgctgaagcaggctttcctgatagtcattgatcgcttttgaaaccggcagggcaagagcgctttgagagcagctggcgagcatcgtatgtgtgcggagcgccggaaataaagatcggtattgcaccagaggcgaattcaagacgtgtttcccccttcggcaggaatatatgtccattatagagtatggtaaaaagaaaaggagggttttatatggagaaaaaagtattgctgacaggctttgaccccttcggcggggaaacggtcaatccttcatgggaagcggtcaaacggctgaatggtgccgctgagggccctgcctctatcgtatctgaacaagtgccgaccgttttttataagtctcttgccgtactgcgcgaggcgatcaaaaagcatcagcctgacattatcatctgtgtcggacaggcaggcggcagaatgcagatcacgccggaacgggtcgcgatcaatctcaatgaggcgcgcataccggataacgaaggaaaccagcctgtcggggaaaacatttctcaaggcggtcccgcggcctattggaccggccttccgatcaaacggatcgttgaggaaatcaaaaaggaaggcattcccgcggctgtatcctacacggcggggacgtttgtatgcaatcatctcttttacgggctgatggatgaaatcagccgccatcatccgcacatccgcggcgggtttatacacatcccgtacattccggagcaaaccttgcaaaagtctgcgccgagcctcagcctggatctcgtgacaaaagcgctcaaaatcgccgcggtgaccgccgcggcgcatgaggacgatattgagaccggcggaggcgaacttcactaagctgcagacggcgcctcggcccatttcttccggtaaacgatgcgggacagcgtcacactgatttcatagaggacgagcagcggaatcatgacgagaaagtcagacataaaatccggaggcgtaatcagcaccgagacgacgatcagcacaaaatacgaaagcttccgcgcctttgccagccgggttggattcacgattccgagccgtgtcagaaacatgacggccagaggcatttcaaacaaaaatccgaacggcaatgtaagattcagcataaaggtaaaatacttgtccgccgtaaataccatgtcaaaatggccggcggataattgtgttaaaaatccgagcacaatcggaaacagcacaaaatacccgaaggaaattccgataataaacaaaaccgaaagccccggaatgtaaagcaaagcggcgcggcgttcaaacggggtcaaagccggcgccgtaaaacgccagagctgaaaagcggcaaccggaatcgttgccgtaagggcgcatattcccgcaatcatcatatatacccataaaatctcgctcggccctaaaacggccagcctgccatccaaatccttgatcagccagtcataaatatcctgcacaaaccagcaggcgccgataaaaaacacgagaaaggcgataacggttttaatgagacgctgccggatctcctctaaatgcccgatcaagtgggtttcttttttatccaatcgtacatcctccttatagagaaagaggcagaagcggattcgtctgcccccatgtcaggattcagcctgccgttttgtctttctcagccgtctgcttgtccggctcttcatttgagaccagtgtttttgcggcgcttttaaattcaagcagcgtgcggccggcggcacggccgatttccggaagctttgaaggcccgaaaatgatgagagcgatgacgaaaatcaggatcaacccgggaatgccgatatttgaaaacatgagtgtgcctccttattgtgagattttggcccgtttctttctcatttgcttttcatgcgcattgttatgggcgaagaaacgatcctcttccacctcgtttgactgctttaaaccgcctgcaaccgccgcttgagaaaccttccgaatccccgtctggtctttctgataaatgaatgaagcccgcgtggatacctcagcccccggctccgtcacgtacggcaccactctgtaatccgctctccattgggcaggggtcaccgtacagcggacatagccgcggtaatcgttgaaaaacttaatatgcgggttttgttttaagatttgatccgtatcggcccgtttatccgctccgtttcctccagatgtaatggaagtcccgacgaattcggctccgaaaatctttgaattcgtttgattaaaatcggtatgcaggtttgacgcccagcttgcgtgaacatcacccgtcagcacgatgacattgttcaggtttttgctttttataaaattgatgacccgctcccgctgagccgggtagccgtcccatgaatccatgctgtatatcggattggcggttgttccgaaattccattgcgcgaaaaagatttgctgcgccagcacattccacttcgcttttgaggcggctaaatttccgaagagccattgctcctgttctgtccccatcaatgtacgattcggatctctccactcatcagaaggcggcttattcccgtcgccgttggcctgatcatctctatactgtcttgtatcaagcacattgaacgatgctaaattgccataagaaaattgcctgtacagccgcatatcaggaccgttcggcaatgacatgcgcctgagcggcatgtgttcataataagcctgataagctgcggccctcctgagcacaaacgcttcaacggattggcctttttcagggataatattggcataattgttttccacctcatgatcgtcccacgtcacgacccacggaaatgcggcgtgggcggctttcagattggcatcagagcggtattgggcatgacggttgcggtaatctgacagtgtatacacttcagcgctgctgtgcgtcctgacatttcccgtttttgacacatattcgttcggtccgtattcataaatgtaatctccgagatggaacacgagatcaagcttttccttcgccatatgtttatacgccgtataatagccgtgttcatactgctggcatgaggcaaatgcaaacgtcatggcggatacgtcagcaccgggagcgggcagcgttttcgtccggccgacgggactgagctcatgcccgcttttaaaccggtaatagtacactttattgggcttgagcccgtccgcctcgacatggacggagtgtccgagattcggcttggccatttccgttccgcgtttgacgatgtgacgaaaatgttcatcagcggcgatttcccattttaccgccacggcctgcttcggcatgccgcccccattcagcgggtcaggggcaagacgcgtccagagaatgacgctgtcagacagcgggtcgccggaagctacgccgagggtgaacggatagtttgaaaatttcggagcggcattcacttcaaacgcgccgatggattgcgcgaccgctaacccgagggaaagaccggcgattttcccggcgccctgtataaatgcgcggcggtcaaacgtattgttctgaaagcttttgttctccaattccttgatccattcatctaaacggccgtcatgtgtcatgtcagttcccctttcgtctcattgatcgcccttattataaaaaagaaatgttaaaccgctatgaagaagtgtgaagggtttgtaaggctgaaaaatggacggcgggagacatttttcacattgtttcgacaaaccttgccccgccgggagaaaaccccctctgtttctttttggcttgtcatccgtcaagcgaacttttttcctatttttcttcacaagaaattaaaaaaacaccgttcattctcagaacggtgcgcccgggattaaaatgtattgtacacgttttcgcacgtttcacctgtcggctgatagaagcagtgggatttgaatctcgcgacaaacggctgatcataccaagtcggcgggcagtttcccggcggcttaaaataccacagactgaacttagccggccaaaaccgttctccgttaatcgtccggcgggcaagcctccgctcggattcacgcggtctctggtaaaagtatccgtgagtcaccgcttcaaacgcgtgcggctgaaacaccatctgcctgatggtgcgcaggcctttaaaatcagaacaattcgcccgcacccgattgattcccacattgccgaccaaaagcattccctgcttcccttcgccttccgcttccgccctgagcagccttgccattagatccagatcggcgctcgacgcttttacgactgccatcatgacacctcccgtattttctcccttcatcatattcagccgcggcccagtgatgacagacaaaagccagaaaacaaatgttcacgaaaaaagggtttatatttcacgttatgaggaaacatactaacatgatttccataaggaggaattcgcatggaacacattaaagcgcttgccatcaaaggcattatgaccatcattattctgtatctgatactcggcttaggttttcgctttacattcggcgacgtgctgctgatgaccattgtgctgggagcagtttcttactttacgggcgacctgtacgtgctgccgagatggaataacatcacggcggcgtccgctgatttcggaatcgcgtttcttgttgtctggctgatgggaatgccgctgtccatgggcatttccggaggaagactggcgtttgccgctcttatttccgccgtcatcatcgccgtcggagaatattttttccatatctatctgatgagaaaagacttgggcgggtcccgttttttagaaccccggtccgaataacgtaaaaaaggccggataaaagcccctttaaagggggctttttatttgtaaagtataaacgctttatacatcttgatataactgataaacccttttcagcctttcttcgagctgttcaaaatgaacaaagcgggcttctctcagaaactcagtcccatcaatgaacaaaagaagcacgggaacagtgaagactgaaaatctgccggccacctcttctacctcgtcagcattgatatgccccaatttgatattcggaaactgatccaatacttttctgagctgcggcagaacagcgtgacatactgtacaggcgggtcttgaaatgtagataaaactgaattgatgctgtttaataaaattctcgatagaatctaatgaatgtaattctgccatctctttcaacaaaaccctcctccaatcggctcgtctttcatgaccaagctcatcaatacgcgtacattcactatacacatttatattgaacatatccgcttttttgctattcagagcacctgaacgttgtgcttgaaaataaaagaacagttaccgcttttcagtaactgttcttagatacttatattaaaaatgcaaagcgtacgcccctgaaccgatgagtgcaactccgatggagactgcaatcagcaccaagttatattcaaaaccgccggcaccgttggcaaatcctttcgctccatggacttttacgatggcacctaacataataatcgttataatagcagctccgagcgggaggaaaacacctaaaataaatagaattccgcttgcgagttccccgagacctgataaagcggccgcggcattacctggtttaactccaattgactcgaaccattgtccggttcctttaattccgtatccgccaaaccagccgaataatttttgtgatccataaaacagaaacaccacaccaatcatgattcgaataagtaatagtcctgcatcttccatttttatctctccttatttttcatattatatgatgtctgcaaggcagctgtttaccaacagtcgcttccagcaaacatctgttaaatgtatgtcttgttatttttcttcatgcttcacgttcatctatcaatcaatctaattctctcacttcaaacggcagcagcccttgttcaatttgtgcccggtgcggttcatactgctcagggagcatcagttttccgcccattttttcttgtgactcatcatgggcaaagcccggcggatcagttgcaatctcaaataagatttccccatgttctctgaagtaaaccgcattaaaatagtttctatcctgaacaggagtcacaccatatccgtgcgcagcaatgaacctttgccaatctaattgatcttcgtcatcctgagcccgccaagcgatgtgatggaccgtgccgatacccatttgcccgcggccgataggcgttaacttaaggtcaatcacatttccgatatcaccggcagaacgataacgaacgaagtctccttctttaccgactcgctcaagccccatgatattttccagcaattcacctgttttttcaggctgtgctgataacagggttgcaccgccaaagcctttaatggcaacatccggggttacatctccgaaagtccacgtattggcctccactgcttctctttccacgatttctaaatgcaggccatgcgggtcatcaaattctatatattgttctccaaaacgctcgatttttgtgtatggaatgttgaacttttcaagtctcttttcccaaaacgccatggcacccttcggcacggcgtaagatgtcacgccaacctgtccgtctccaatgatgccttggcgggcgcccgcccacggaaagaatgtgatgattgttcccggcttcccgccttcatccccaaaataaaggtgatacgtacccggatcatcaaaattgaccgtttgcttaaccaatcgcagccccagcactccagcgtagaaatcagcattctcttgagggtgaccgacaattgccgtaatatgatggatgcccatcgtttttttcgccatttttatttgctcctttacaaatagttaaatatactccacaaactcattcacaggctttcggtagccgcgcggccttctgctttctattttttctttcccgattgtaatcatcatgacgacctcaaattgatcatctatcttcaaaatctgtttcacggcttcagcatcaaaccctatcatcggacaggtgtcccagcctttttccttagcactcagcataaacatcatcgcagaaagtgaagcatttcttatcgcctcatctctcttaaatggttctcccctgttttcataaaacgaaacggtgtcttgaaccatgtgatcatactcttgtttatttaatacccccagcatcttcaatccttcatagatgtcagccgcttgctgatatgcctgcttatcccctaaaaccaaaagaacagctgatgagctaaacactttatattgtccgtttgcggcctgtttcagcttttcttttacatccgggtcaagaaccgtcacatattttgtgtgctgcaaattaaaagctgatggagccaacgcaaccaattcaaacatttcattgagctcatctcttgtgattggatgttctggaagaaagttgcttgcagatcttctttcattcactagctgtacaaattcagccatttccctcgcaccccttttatctcgaattcgagatattatagtataaaaaatcaaataacgtatgattaaaaaacgaaacgttctcttcactgatcttttcgtgattcaaacgatcggcaggttcttatactgcactctaattaaattatcttgaattaaaaaatcttgaattcgagataataataaaagataaacactcaaatgtcaacagttctttttttaattcagcgccattttgtctgtgtactgtttagccctgctccaactttttttctgtcaccttatttattaggaaacaggaaacaaccttgctatagacccactcgaaactgaattggtacgataagcaaagtgattacacaagaaaggatacggagagcgaatcaaaagcgcctctatttttttgtgcagttttataggaggaaaaaatgacaagtgaaagagaacaaataagcaaaaaagttgctttgattgcattgatagccaatctgatcttaatggcaggaaagatcttttttggactgataggcgatagtgaagcagtttttgccgacggtatacattctgcagcggatgtcgcggcttcaattgctgtcctggccgtcatcggcatttctaataagccgcccgatcaagaccatcctttcgggcatggcaaagctgaggtcatcagcgaagcgattgtaggaatcatattagtgctcgtttccgtgtatattctgatagaagcgatttcgtcctttgttgaaggtccaagcatcccgcaatacagcgcattgtttgcggctctgatatcctacgcggctaagcagatcttatatcgttattcgatcaaacaaggggaaaaatggaacagtaaagcgattatagcgattgcatacgatcataaaggcgatatcgttgcctctcttgccgcttttatcggcgtcctattggcgattatcgggaacacacgcggatggtcctatctgttgtacgctgatgcaattgccagtgtcatcgtggcgtacctcatttttaagatttcaatggaattaatcaggccgtctgttgacgttctcatggaaaaaagtgttgatcccgaactgatagaggaatataaagccgttattttgcactgccctcaagtcaaacggctcgataaaatccgagcaagagaacacggccactataaattgcttgatgtccggttatctttggatcatgatttgacgattaagcagggacacgatattgcccgcgaaatccgaaatgaaatccaaagacacttttcagatgttgaagaagtgctcatccatgtgaatccttattttgaagaatgaaaaagcagcttgtagagaaaatgatgtttttctacaagcttttttgttttgtgctgtttctttacatattcatttgatttcagttgcagaaaaagcactcccgcatgcctagccttgcttggctgggtatgtggcaatcttcaacatcattttgaataagatcagcggatcaagtgagggatggcctttattttcgctgcagtaaggtgtgaccttttcaacgatgaaagagaagtctatgtatttatcaatttttcgaagaaggtgatcctcttcgacgagttggtcaaacagaacgaattcggctgtgtttcgagaaaaatttcttgtgtggaacatgagaaagacaccgttttttcagtctttcttttattttatgacaagggaaacataaaggctgtcgagattttctcgacagcctgaaggccggataacggcctttttcgtttgatttcactgatcaatatgctttctgataaaatgcagcagcgtgtttccttgagcggtcaatatgacgcccttcgcgccgcacttcggacagggcgtcccttctttctcctcgccggttccttcacaatgcggacacgtgagctcaagatcgtcggttgcgatcaccatgaatatccctcctttttgattgtctgtccgtctccagtcactttccatggccatcacctccttaacaatacaaaaaaccccgtccatcaaaggacgaggttttcgcggtgccacctttattaacggctgaagagccattctctcaaaaagtacagaaacacacggtttcaatactcctttcttgataacggggaaagaatcccggcaccgcctactgtcatttcagcgcagcaattcagaagcccattcggcaccggacggggatcggttcacagcggccaccgactctctgaaccccgcgcgctgatgcgtacttactcttcctcagcattgttcatccgttcttttattttaaaatgtatcatacgctgtcatccggcggaagtcaataacctttcggatcggacaggccgagcatgtcccgcgccatttgcatatgctcctcttgccccgtctgaagcgcgaacttcgccgttttgtttctttttctcctaatatcacttgataaaggacaaaatccttggccggatcagcaacctttgcctccgtccaatcgaggagacccgtcacacgctgattttcgccgatcaaaatatgcggaggatgcaagtcgccatggatcagcacggaaaaatcaggccagtacgagctgtcatttatccacgtttgccatcttttccaaagccagcttaccggctgcctccgctgacaaattttgatccttcgcgtaaatctttcgcctccaaaaagaagacgtgaatgaattttttcatattcactttaaccggagaaagcggcacggtttccttagcctgcatttctttcattctcttgctgacagcggggaaatcaaagaatttcgaggcgtaatattcaaatttggggtttgaaaaatcagttgtgcccaatgaagcgaaatggtttaacgaatgaatgacggcccttctgatccgctgttccgaggctttgatttccctgttaacctcggcttgtgccgccgcaggccccagcttccggatggcgacgtttgtaaacatctgctttaaagacgggatgtttctttccgcctgttcatcctcaaataaatagtgaaggacggccatgaggtcatgcgccccgctttctcccacgatgcctaattccgataaaagaaattttcctgtttctttgattgatttctcgtgcatcccccccggcccgctttttttcggctcattccgctgaattagacggcttaacgagtgttggatgtcgccgatcgaggtttccagttcaatccgctcttttacttttcgcaaaacggtgacgatctcgattttgttgatcggtttgtggataaagtattcgatgccgagagaataagcttctcccaccatttcctttgcctccacctgcgatatcatcaccgcttttccattgtacgatccctgaagatgccggatcgtctcaatcccgtcccgacccggcatcagcagatcaattaataaaatatcgacttgtttaaaatggagataatgcccttcaatctggcttccgtcctctgcctcaccgacgacttcgcctaaatcctcgtcctcaatcatctgttttaaaatggaacggatcgcccggtcatcatcagctataaaaaaacgcatattatgagttcatcctttctgcaatcaaatgcttcaccggcagcttaatcgtaaatatgacgccttttggcttgttatgaaaggaaatgtctccgtcaagttcagttacaatttccttcacgtaagtaagcccgatgcccgttgaaggtgtgccgaattcatcgtatttggatgtaaacccgggatcataaacgacctctccgattttttccggaatgccgggaccgtcatcttccgcctgaaattcagccttttctccttccgccctgcgcagcgcgaggcggatctcacccctgtcacccatggcttcgacggcattggcggtcaggttatttaagatcgacaggacggtaaagacgtgataatcgggatgctctccttcaatcacgctccggaattgaatgtccttgcctaaagattcggcgtatttttcattgattcggatgacgatgccgaccagagcggcggcattcatgtaatcccggaatctctcattggaaatcagcttcgacaaaccggcgaatattcgctgattgtcttttttcacttcatgaatttctcccgcaagtcgcagcattcggctcccgagctcccggtcgttcccgctcatttcccgatatagctgataggattctttcgtcacatgctccgtcgttttcagcgtttttttcaaatgaatcgtttcttcatataagttagacacaatcatcagcatatgctcatgctgctttctcgtttgtttttccctgacctgagattcgtgcagcttcatcacgttgaaaaaactcagcacaataaatgtgtgagaaacagcgataaccgcaatatccgccagcttgtccggcatcataatctgccggccgccggaaaactgaaccgtcatttcaacggcatcggacgcaatttcaatgagaaaaccgagaaaaccgatcatcagcggccgatcccaaaaaagcctgaccttcagcacataaaacaagcaggcatatgtaaagtaaaaaaagaaactgggatattggctgaaaaaaacctcggtaaagccggcatgctctcctccccagcacgccaggccgatccggaatgccacaacggctgcacctgtcaacagccctgacaatactgccggcacatgccgaagcagcagcagaaaaaagaaaaaagccggggcgccgaagctgatccgatatacctcattcagggggtaaaatttcagttcccccgccagcggcacggtgatcagcataagggcgaaaagatagccgtcttttttcagtaaatagtcgagcctgatcataatcacttccttcttctgtctattttgaacaagaccgatacagtccgcaaatttctttagacccgaatggagggacgctccggctgatttataaatctatcggcttattttaagaatgattttgtcgtattttgtatgattctgtagatgtcattatacattaacatggaacacgctatttttgaaaacgttttccaagaccggtttccgcttcggacaggcttgcaatagaggaggaatgttatgaaagatatggtcagagagcgccttgcaaaagaggaactggcttcacttttacaagattgggtcgagcattaccgaccgttttccgtcaatggaaaaagcgcaaattatatacccgccctcggagaaatcaacgactctcagctgggcatttgcatattagagccggatggctcaatgattcatgccggtgaatggaatgtcccgttcacattgcagagcatctcaaaagtcatcagctttattgccgcctgcatgaacagaggcatttcttacgtgctggatcgtgtggacgtggaaccgacgggtgatgcgtttaattctatcatccggcttgaaatccataaacccgggaagcccttcaacccgatgatcaatgccggcgccattaccgtcgcctcgctgcttccgggtgaaacggcgcatgataaattagaatatctcttttccgtttttgaaaaattaataggaaaacgccctcacattcacgaggaggtcttccgttctgaatggcagaccgcgcatcggaaccgagcgctcgcctactatttaaaagaaacgaactttctcgaggcggatgtggaagaaacgcttgaagtgtatttaaagcagtgcgccatggagggtacaaccgaggacatcgctttaatcggattgatacttgcccatgacggctaccatccgatccgacgggaacaggtcattccgaaagatgtcgcgaaactcgccaaagccctgatgctgacgtgcgggatgtacaatgcgtcaggcaaatatgcggctttcgtcggcgtcccggccaaaagcggggtatccggcggcattatggcattggttcccccaagcgccagaagagaacagccttttcataacggctgcggcatcggcatttacggtccggccattgatgaatacggcaacagcctgaccggcggcatgctgctgaaacatatcgcacaggagtgggagctcagtattttttaatcaaacgaaccaagaggtgattggatgcaggaattccttgaaaatgtaatcggctcggcaaatgattttttatggtcaaaactgttaatcgtactgcttctttctctgggactgttttttacgttcagatcaaagggtctgcaagtccgcatgctgaaggaaatgatccgggttttgaaggaaggcgcggccgcccggacaaaaaacaccatttccccgtttcaggcattttgcatcagtatggcggcgcgtgtcggaaccgggaatattaccggaatcgccattgcgatcgcactcggcggtccgggcgctattttctggatgtggattatcgcagtcatcggttcggcttcaagctttgttgaaagcacgctggcccaaatttataaagtaaaagatcaaaacggattccgcggaggcccggcctattacatggaaaagggcctgaagaaacgctggatgggcgcgctgttcgccgtattaatcacactgtcattcggggttgtttttaattccgttcaatccaatacgatcagcgtcgcctttcaaaacgcattcggcaccagccggcttacattgggcattattttaatcgtggttttcggcggcgtaatcttcggcggcgtcaaacgaattgcgaaaatggcggaatacatcgtagtcgtcttggccgttttatatatcggtgtcgctttctttgtcattctgacgaacatcacccaattgcccggcgttctgtcgctaatcgtaaaaaatgcgttcggcattgatcaggcagcgggcggcgctttaggtgcggccttgatgcaaggtgtaagacgcgggattttctcaaatgaagcgggtatgggaagcgctccgaacgcggcggcgacagctacgacgagccacccggtgaaacaggggctcattcaggcattcggcgtcctgacggatacgctcgtcatttgtacaagcacggcgcttatcattttattttcagacgcgtatcaccagccgggactgagcggcatcgcgctttctcaggccgccttgagcgatcatgtcggcgcatgggcgtcaggtttccttgccgtcttaatgcttttgttcggcttcagcgctctgatgggcaactattattacggagaaaccaatatcggatttttaagccagaacaaaaaatggctgttcatttaccgcatctgcgtgctcggaatggtactgttcggctgtatttccaaagtccagcttgtgtgggatatggctgacttgttcatgggcttaatggtggtcgtgaacttaatcgcgattttccttctgtcgaaaaaagcgtttgccgctttgagcgattatgtccggcaaaagaaagccggaaaggaccccgtcttttacagagatgtactccctgatgatgacgggatcgactgctgggagtattcagacatcgcgaaaagtgcgaaaggcaaacacatttcctaaacaaaaggtgttcgggcagcgtcctgaacaccttttttctgccggttcattgacaaagagaatagcgtccattaccctttttatatattttcagtaaagtcagaaaggaaggcctatgaatcccattacacaaatattaaatgaatacccggttatgatcatagacggcgcgatggcaaccgagcttgagcggatgggctgtgatttacatgatgatctgtggtcggccaaaattcttttggagagaccagaactgatcaaacaggtgcatgcagaatattttgccgccggcgctgattgcgcgatcaccgccagttatcaatcgacaatcgaaggatttgcagcgcgcggcatcccggaaaccgatgcgatacgtctcattcagacatctgttgaacttgccgcacaagcacgcgatgaattttgggcgcatgaagaaaaccgtttacaccggcccaaacctttggtcgccgcttctatcgggccttacggcgcgagcctcgctgacggctcagaatatcgcgggcattacggactgacggaggatgagctgatcagctttcaccgcccccggatgaaagccctcatagaatccggcgccgatcttttggcctgtgagaccattccgtgcctgtcagaagcaaaagcgatcacaaggctgctggaggaattccccggcacttatgcatggatcagcttcagcgccaaagacgggcggcatatcagcgaaggcacgcctatttccgaatgcgcggccctgcttgactcctgcagccaaatcgcagcgatcggcatcaactgcacaccgatcgaacatattccgccgctgatagaagaaatcaaacgggcagcatccaaaccgattatcgcctatccgaactccggtgaacaatatgacccggtgacaaaaacctggaaaggcgcagcgtgcgaaaaccatttcggaaaaagcgcgcaaagctggtacgaaaacggcgtgagcctgatcggaggctgctgccggacgaaacccgcggacatccaagccattgccgattgggccaagaccttaaaaacaacttgactaatcggaatagtttgtatattctattcaaaaagccggttcgccggaatctcgtgccgttcgccggcatgagattttttattagaacggctctcgcagaaagttggaaaacaatgaacaacaagaacgagacgaattttcagagaagtatgaaaagcagacacctctttatgctatcactcggaggtgtgatcggaacggggctgtttttaagctctgggtataccattcatcaggcgggtccggcgggcaccattttcgcttaccttttgggcgcgggcatcgtctatcttgtcatgctttgcctcggtgaactgtcagtggccatgccggtgacgggcgcattccacacctatgcgaagacctatatcgggcccgcgacgggctttacggtcgcatggctgtactggctgacgtgggcggtggcgctgggctctgaattcacggcggccgggcttttcatgcagcgctggttcccgcatacttcagtttggatgtggagtgcggtattcgctcttttcatctttttattaaacgccttctccgtgaaattttttgctgaatcggagttttggttctcaagcattaaagtcttagccatcttactgtttattttattgggcggagcggcgatgttcggcatcgtcccgatgaaaagcggtgaggccgcacctatgctgtcgaactttacggatggcggcagcctttttccaaatggctttttcccgatactgatgacgatgctttcagtaaacttcgctttttcagggacggaattgatcggaatcgccgcaggggaaagcgccgatccggaaaaaaccgttccgcgcgccattaagactacagtctggcggctggcgcttttctttatcggaacgatttttgtgctgtcagggatgatctccatcaaggaagccggtgtgattgaaagcccgttcgtcacggtatttgacagagtcggcgtgccttatgcggccgatctgatgaatttcgtcattttaacggcgcttctgtctgcggccaattcagggctgtacgcgtcatcacgcatgctgtggtccctgtctaaagaaggggagcttcatcccgcctttgccaggctgacctctaaaggcattccttttaacgctctgatcttcagtatgatcggcggcattctgtcgttgttgtcaagcgtatttgcagcggatacagtctatcttgttctcgtctccgtctcaggatttgcggtagtggctgtgtggatgagcatcgccgcatcgcaatttttgttccgaagacggtttcttacagaagggcaccagctttcagacttgaaatacaggacgccgggatatccggccgtaccgatagcggcctttctcctatgcctcgcctcctgtatcggcatcgcttttgatccgaaccaggccatcgccctttattgcggaattgcatttatggccgtttgctacaccgcttattacttgaaaaaccggaaaagcagagcccgcgtgcaagccgtaaaatcccaataaccaaaaaaagaaccctgcagcgcaagggttcttttttcatttatacttcaaccacccatctgaacgaatcccgcaccttcccgacttggatgccggcaatcgtttcatagagcctttctgacacttcaccgatcaaaccgttattcagttcaatcgttgctccgtgaatgtgcagcgcgccgaccggcgagatgacggccgcggttcctgtaccgaatacctctgacacctcgcctctcatcgcagcctcatagatgtcatcaatggcgacctgttcttccctgacgcggatgccccagctttttaacagctctatcacagatgcgcgtgtgatgcccccgagaatgcttccgtttaacgccggcgttacggcctctccgtttatgatgaaaaagatattcatactccctacctcttcggcatatttcttttccaccccatcgagccaaagcacctgatcataccccagttcttcggctttccgctgagcctgtaagctggccgcataatttccggacgttttgacgtcgcccactccgccggtgacggcacgcacatactcatcctccacataaatccggatcggtttcagctgatcgccgtaatacgaaccgacaggcgtcagaacaaccatgaacttgtaacgctttgacggccggacgcctaaagaaggctcagtcgcaattacaaacggacggatatataaagaggttcctttttctatcggtatccattcctgctccagctccaccaattgtatcaatgcctccagcgccagcttctcgtcaagaggcggcatgctcatccgccgtaacgatttattcagccgttttatattttggtcaggacggaacatcaacacccgtccgtcttctgacctgtaagccttcagcccttcaaatacggcctgcccgtaatggaaaaccgatgcggaagggtcaaggcggaccggttcataaggggtgattctcggatcatgccaccctctctcctcttcgtaatccatgacaaacatgtaatcagtgaagtacttgccaaaccccaatgaagcggagtccggtttttcttttcttgctgtgaccttacgtctttcaatcagttgattcaacaaaagcacacctttcttttaattgttcaaattttcagtcttttataagctgcctgttttctctgcctgaatcgtgtatgcacagatatatgaggatgcagttgaccgtatcatatcaaatataccacttataagaggataattatcaaaatttttgatattttcaagcgaaaatctaactttattttattctgcttgatttttttcaatgaggactttctgtcatattaaatgattgcgcttacataatgtaaagcaatcctttctttcgcacagtcaataatgtgacaaatttatggcgaataggaaggtggttgccgcctgcttcacgaattacgtatgaaatgcgcaagtaaaagggggattcgcttgaaaaaatttatcgcattccagattttgatcgctttagccatcggagcattgatcggccacttcttcccggatttcgggatggcgctgcggcccgtcggagacggatttatccgcctgattaaaatgattgtcgtgccgatcgtgttttcgaccattgttatcggagccgccggcagcggcagtatgaaaaagatgggcagtctcggcatcaaaacgattatttggtttgaagtgattacgacgcttgttctggcgctcggtctgttattggcgaacgtgctgaagccgggagtcggacttaacctctctcatcttgctaaaaaagatattcacgagctttccggctatacggaaaaagtagtcgacctgaaacaaatgcttcttgatattatccccgttaacatcattgacgtcatggcgaaaaacgatcttctcgccgtcatttttttcgcgattttattcggtgttgccgcagccggcatcggcaaagcctccgcacctgtcatgagtttcttcgaatccacggcaaatattatgttcaagctgacgcaaatggtaatggtcaccgctccgatcggcgttctcgccctgatggccgcctctgtcgggcaattcggaatcgcgcttttgcttccgatgctgaagctgatcggcactgtgttcctcgggctgttcctgatactcttcgttctgtttccgatcgtggggcttatctttaaaatcaaatactttgaagtgctgaaaatgatttgggatctgtttttgatcgctttctccacgacaagcacagaaaccattctgcctcagctgatggatcggatggagaaatacggctgtccgaagcgggtcgtctcctttgtggttccgtcaggtttatcgctgaactgtgacggctcaagcctctatttatcggtgtcctgtatttttctggcgcaggcgtttcatgtggagatgccgctttctcagcagcttctgatgatgcttgtgctcgtcatgacaagcaaaggcattgccgccgtcccgtcaggctcactcgtcgtgcttctggcgacagcgaatgccgtcggtctccccgcggaaggcgtcgccatcattgccggtgtcgaccgcgtcatggacatggcgagaaccggcgttaacgtgcccggccatgcggtcgcctgcatcgtcgtgtccaagtgggaaaaagcattcaaatataaaggacccgtcacggcagaccagaccgcccggacagaaagtatgtaaacacaaaaaagaccaccttattggtggtcttttctattaatcaatcgccgcatgatcctcttgttcaatcaaagcaaggcgttcattgatttcttcctgagtcatttcgtgctctttcacatacatgttgcgttcgttcgtacggcattcgtgactgcagctgcgcatgtatttgtattcattctcaggtgtgcagatcatttttttattacatgccggatttgcgcagttcacataacgctcgcacggctcgcccgtgaaataatcttttccgatgataacgtgctctacacggttgaccggtacgctgattctttcgtcaaacacgtagcactgtccgtcccacagttgccctttcacttcaggatctttaccgtaagtgacgataccgccgtcaagctgggacacgtcttcaaagcccttcttcagcagccagccggaaaatttttcacagcgtacgccgcctgtgcagtacgtgaggatttttttgccttcaagcatgtctttatgctcttcaatccagtccggcagctcacggaacgcctcaatatcaggtctgaccgctccgcggaaatgaccgaggtcatactcatagtcgtttctggcgtcgatcacgatcgtgtcaggatcctgcatttgctcataaaagtctttcggtttcaaatgcttgcccgtcgtgacattcggatcaacatcatcttcgagacgaagcgtcaccaattcttttttatggcgcacaaacattttgcggaatgcatgtccgtcagcctcgtcaattttgatcggcatgtcggcaaagcgcggatcagctttcagtgcattcatgtattgatccgtctgttcaaccgttccggacaccgtaccgttaatgccttcctcagaaatcaaaatacggcctaacagaccgagctccttacaaaacttcaaatgctgagccgtgaactcctcaggctcatcaatctttacatatttataataaagtaaaactctatattgtttttccatgatttatacaccctgttcaattatattaatgatcgcacactctactatatcatacaggaaaacgggcgaaagatgaacatttccgtccgtactctttcttccagtcacgcttcgccttttaaaacctgctgaaaataaaaccgatacgtattgcgcaaaaaggtctcaagcgaaaggccggccgcggtctgatacttgccgataataaacggaaaacggtcacggccttttgcccgcaaaagatcggcgctgtcttcagccagttctgagatgagcgcctcaacgacaggccggcatgcgtcccgcacggcttcaagaatttgctgatcccctgtatgctggtactgttctatcagctttgccaaatccttttcttccataatgttcacttccttacaccatataaaaaagaggagcagcttttataaagcggacgcctcctcctgtgactccgcataaccgatgatctgaccgacctgtaattcacggccttcagtcaggttatccgaaggggtaaacatatctttctcgaatactaaaataacggtcgatccaaatgaaaaatagcccagctcttcccccgtctcaagcctgtttccggtgtttgtctgaacgatcgagttaatattcatcgcacctaccggaatcatgagcatctgctggtcagcacgggtcagctcgtacacataacggtaattttttgagagcacgtctttcccgtactttaaccccatcgtattaacgggataggagcgtttccccagctcggccagcttctgatacgtgcagctgacaggagaatggaagcggtggtaatgtctcgggctcaggtaaagcacggcaaaacacccgccgttatacttgtgatcggcgcttttaaaccccgtcagttcggcgaacgaataatccttcccttttaccatgaaagtttgattgggtttaatcatgccaaccgtctgaacgacaccgtccaccgggctgacgatggcgttcttctcttttgccacggggcggagatttaaattaatatcacgaatgaaaaatgacgccaatgaatcaaagtcagaagccgtgcgttccgtttcattccagttgatgcgatagtgtttggaaaacagcggaatcatcggcttgctcagtttcgattcacagaagtttttaatgagataagacgtcaatcgattattagtcagttcaatcaatgaacggtaaagaactttagcggcagtattaaacattgattactcctatgaattttcctatagtaataaaaataaaacaccataaaaacgctccgatggcggcgaagcataagtaggttttgaattccattctgccgattccggaaaagtagcaggtcacgtgtctgatgccggggatgaaataacctaaaataatggtgtacggcccgtacttcttcatccacctgtctactttctccatcctcttttccttcaggccgacccatttcccgaacttattaataaacggccggccggcttttctgccgatgaagtagctgataatcatccccaggagcgctccgataaagctgatcagaatggagagcccgtaattcagcacgtttaaatgagcgaagtagcccacaagcgtcatcatgacttcatccggaataggcaatccgataataccgagtgtcagcataagaaaaatcgcgatatatccgtaatcggatattaattgctgaactaattccatcttctgctctccaggttttcaggcgcctgttttttaaagtgcggaaatttaatgttgctgaccattaaataaccgagcgcgatcgttcccgcccccagaagaaaagcgttattgataaagctcaaaatgacaagacacatacccgcaaacggaatcggcatcccgataaacgtcggcagcttgctttgttcaatattaaatctggaaagacggatcatcccgcagatactgtaggaaagcgcgattaaaattccgatgaacggaatcgtatatagtgaaacactgtaagcgagcatggacggcgccacgccgaacgtcacgagatcagcaaaagagtcaagctcccttcccatctccgataccgcgttcagcttacgggcggccaaaccatcaaagaaatcaagaaacatcccggtgaaaataaagatcaccgcagagtgtatattatgatacaaaagggaatgaatcgataagagcccgcaaataaaatttccaattgtaatcatactaggtatataattcacagtttacacaaacctccaattaaaaccatatcaaatcggactgcgtatgcataaaggctccattttacggaaacataaaatgaaattctttcaatgctatcattcaaattcttttattatacagcatttggtgttatttgaacaatctaatctggtgatttttgttttttcgccgttcatattaaggtaagcaatcatggattcctctattccggattaccctgcttcaatattccatgccgcgatccggattgtccgttcttgatgaatgaaaagccgtatgatgtattgttatttccttctccgtgaaatgagaacattacatataacgattgcggacataaaaagtttcatgaattaaaaagccggcacaaaacggcctcatacattatctcacaaccccgttttccagtatatagtctgccaaacaaaaaaggcgccttaccattacggtaaaaacgccttttaagatcattttatgtaattgataaatgactgagtgcttcggccgctatttctctggcttcttcaacggtctcagctgcagaaagcgcaaccgccatacggcgtccaactttcgtgacgggtttaccgaatacgcggacctgagtgctttttaccgccaaagccttctccaaaccttcaaccgcataatcagcaagctcttttggcgccttcagcggacggcttgcccccggcgacagctgagtgatttccggaatcgggaatcccaataccgcgcggacatgaagcgcaaactccgacaaattctgcgttacaagcgtaacgagccccgtatcatgcggacggggagacacctcgctgaaatatactttatcttcagtaaggaaaagctccaccccgaacaaaccgtatccgccgagctcgtccgttatgcttttcgcaatgtgtttcgcctctttgatctgctgttccgtcatatgatgaggctgccatgattcaatatagtcaccgtctttttgttcatgtccgatcggcgcgcaaaaggacgtaccgttcgccgcgcgcactgtcagaagagtgatttctgattcaaacggaatgaattcctcaacgatgacccggccgtttttcacccggccgccttccatcgccatgtcccagcagcttttcagcccggaagccgagcggcacacgctttgcccttttccggaagagctcatcagcggttttaccacgcacggaaagccgattgtttccgccgcttctttaaattcttcatatgtattcgcgaattcatagccggcagtcggaagatgaagcgtctctgccgcaagccgtctgatgccttcacggtccatcgtcagctttgccgcacgcgcattcggaatgacgtgaaaaccttcttcctcaagcttcagcagctcatccgtcgcaatggcttccacttccggcacgatcaagtccggtttttctttctcaatgacttctctgacctgcgctttatcaagcatatcaatcacatagcttttgtgcgcggcctgcatggcgggagcatgctcatagctgtcaacggctacagtgacaaccccgagccgctgcgcttcaatgacgacttctttccccagctcgcctgatcctaataacaacatcttcttcgcctgatacatgtcctttggccctccctttctataccccactcattataacggaaatattcaaaaaataaagacaagatagataacaagctctatcctgtcttttgcgctgattcgagcgattcaatcgcagctgacacgtccttctcgcgatattgccccattaagcataacgattcttccgcccggcaggcgtgagaagcaatgcggcgcttggcttcctcatggttgtcaaggatgccgagatcacagagactgacggggaaaccgagccggcggtaaaacggaagcagctcttcaatctcaggtcttcgattctcaagcgcgagctgcaccaatatgccgtaagcaaccttctggccatgcagcacctgatgtgtctcctgaagaaaactgagtccgttgtggaccgcatgcgcccctgccatcctgcacaaacggccgccatacccgccgaccgtccccgcaagcataatgatcgtttccgccgtatggatgaacggcacggacagctcgcctttctccatgcttccgacggccgcttcactgtaacgcaataacagattacggatatattccgcctgtctcagccccgcctgcgccatcagcggcgccgcctcctccgtatttctgatgaccgcctcggcctcataccatttcgccagcgtatcaccgatcccgcttttcatatattcaatgggagaggaaagcaaaaacagcggatcaacaagcgtcaaatagcttgaacgcttatgataatcaactctgataaaattgccgctctcatcatatatgacactcaacggcgtacttgccgcacacgtccccgcaatggaaggaaccatcacagcttcaatatcaagccggtctgccgccgcttttgccaaatccaatatcgtgccgcctccgataccgatgatcacatccgcgtcttccgcctgctcacagaccttacgcaccgcctcaggtgaacagtatcctttatgctgaatcacatcccaggaagaaccgccgccgtaatcggagaacgcctgataggatttgattccggtcacaataacgggttttctgaatgtctccagcagccccggaagttcttttgcgattccttccttgcatatgtactgattcgggccgcttcggacgatatcttcaggcttcattcgaatctctcctttggctggaatttatatatattttcccacttgtcagaaaatacatcaaccggaggtgcttagcgcttcgcttcttccgcctccaaaaacagctcatcaagccgctccaaagcctctgccttttcaaaactgctgaaccacagatcatcataagaatcaaggatgcggtaatggtgggaaatcaaatgctgctgcaagcggaactcgccttttttctcgatggctttccaccacaccttgccgcccatcgtcttccccttcggcctgtcaattgtgcggtgagcaaccgtttcaatgacctccagcggatcatctcctaatacggattgcagtgtttcacttgatctgaaaagcgcgcaaaccgccacaacatgcggccattccgcaagcgcccgccctttctcaatctgcaccagcgactttttagaaaggccgatcacatccgccattttctcctgtgtgtagcctctctccgaccggattttcttcagctggactgagacaagctcagtcatataatcttgatccatctcaacctccatatttatcaatatagccattttacaccgcggcacgccttttttatatcagaacattttcaaacgaatcaaaagaacccgggattggcttatcattgaagcgatgtacctttccgcataatccagaatgatgcggtgaaatacaaacgtacgcccgaagagacaggtgcgggctccctggcggttgagctccggacaaaataaaaagctgccgcagctgcagcagctaaaactttatagaccggaaaatcagcattatgaagcgaatacaatccatcttgcactataattgacacgttttttcgaaccctgattgaccattttaaatctgtatgaatctcctttttttaacgaaggtgtttcaaaataagtcgttccatttttctttgcattggcggttttgattgttttccaggcacctttgccgttgacttgcttttggacgtatattttatacgtgcccttccctttactgttggatttaaaagtcacggctctcaaggtgtacttttttgtcgttttagtgaatttagggtgatatgtattgatcacatagttagtgaaatacccgcttttataagtatgaagccagtctttagcctctgctttttgcggagaagaaaaacccataaaaccaattccgctgattaaaagagtaaaaataatgatgagcgacttaaaaatctttttgcttttcatcgagaaaatccttccttcctgtaactatttaccctatttatgttaatgacaatatagccaatcataaatccgtccaactaaccattttgaccgcaggaagagatgtgaacagcccttaaaatgactatatgactactacttatgattcttgttatttttgattaagtgataaagttactttaaaccgctattcattttgttgtttttgtatcaattgtcatagcgaggtcttttcctatcaatgcctctctttcggcgtttgttctgctgccgtgatggggctctccttggataaacccctgcacccatgacaaactgtcatacgtttgccacctatgaatgaacgcacaatacacataatggagggattgcaatggacgaaatggtcctggaaacacaacaatggctgaatgagacgtacaaaggcagacacgggtacaacaaagtgccggaaaacggaaaaacgggctgggataccatttacggtctgacacgggcgcttcaaattgagcttggtatttcagaacctgccgataacttcggaccgacgacacaaagattgtttaagccgttgaaaaagcaggctcccgattctaagccgacaaacatgaattacattctgcagggggcgctgtggtgtaaaggttttaaccccggcggattttcaggcgttttctatgaaaataccgaaagcgctgtaaaagagtttcaaaaagcggccgggctcactaagcaagacggcatcgtcacggcactcattatgaaagccttgctggatatgagcgcttttcggttagtagcgggaggcgacaaaaaaatccgccaaatccagcagaacctgaaccgggattacaatgactacatcggcttgatgccttgtgacggcttatatgcccgcgatacaaacaaggctctcatttatgccctgcaaaaagaagaaggcatgagcacaagcgtcgccaatggatttttcggaaacggaacgaccagcttatgtcctaccttgactcccggcgattcacggacaggctttgttttgattgttcaatacgcgctttactgtaatgggaaatcatttgaccccggtgaattcgacggaaaatacggcgtcggcgttgtatcggcagtgaaagctttccaaaagtttatgtgcctgccgcagaccggttatgcggacatgccgacgattaaagctttattatcaagctcaggcgacacaacacgggctgcttcagcttgtgacaccgctgccattttgacggcagatacagctaaaactttgcgtgagaatggctataagatcgtgggaagatatctgaccgggaatgtgcggacaagcagcggactgacatcgaaagcgttgacgtcaaaagaactttccgcgattttcaatgccggcttaagcgtgtttccgatttatcaggacggcggctatgaatcttcttattttgtaaaagaccaaggaacgagagatgcgtacagcgctgcatcagccgcccgaagattaggttttccgtcaggaacgaccatttactttgcggtcgatttcgatgcgtatgattatgaagtcacggataaaatcatcccttactttcaagaaatcaagtcagcttttatgaaaatgcaggcgttctcaactgcgccgaaatatgaaatcggcgtatacggaccgagaaacatttgtatccggacgtcagaagcaggtctgaccaaatatagctttacggctaacatgtcgaccggattcagcggcaacctcggatacccgatgccgaaaaactgggcttttgatcaattttatgaaggatcaatcggaagcggagcgggaaaagtcgccattgacaaagacggatactccggaaaagactcgggtgcaagcagcgtccatccgccttctgatcctgtgtatgatgcaagactgcgcacgctgacggatattttaacaaccattcctgctttagaaaatatatcgaatcttgcgaatgccatgtttgaattcgacaagacagaaaccatttatgcatcacctgaaatggatattcttttatctacttcacttttggcaacagtgccaagcgaaggttctcccaacacagttaccattacaaatggcaaaccgggagcctatattaccggtctgatgggagattcacaagtctcttttacagcatcacaaattgattcctatcaaaacctgcttaacagtctgagcttgtcagtccgcaacggttatttagaagtgtatgtcaatccggctgcaggatcgctgaatattcaatttaaaatttatacacctgatattccggtcggtgacagtgctacaactggactaacaactaccattacatttaaaataaaacaaaagagcttcaggttgccggattccgaagaggtgtactccccggattgggattctgtcgtgaataccatggctattgcaggcgcaggaattattgttattgtagggatcggtgctttagtcgttttagcacctgaattaggaggagcggcagccttgttcagcacggttttatcactatttctataattgaacaggcagctccttgctccaggaatgctcaatgagtattcttggagttatttctaaaggaggattcgcatgaagattgatatgcagacatacaaggacaccgttcaaaaaatagaaaccgatttgattccgcgaagtcaaaatgacgaagaactgcttacatacttaatgaaacaagattcgctcacactgaatcaaatgaaaatgtgtttcactgaaccgcccctcaccttccaacatactgtcaaaatcgtatgtacagtcacattcatcacgttatatatcttttttttcagcactcattttaatgatttgattgaaatggctctgcagatggttttcggcctggccggccttgtttggattattgctgtatttccgttttcaagaaaaatccaagtgtctgaccgtttcagacaaaaatctgaaaacacccgtatcaccggaatgatagacttcgtcctcgaacaacgatacaaagacatgatcagttaaaaatccctctgcttaaggggtttttttattatgcaatcccttcaccccccttatcaaaaaaggcccttcccctttggaaataaccggaacacccaatttcgttttcaatataatgaggtagtggatctgcaaagaaagaagggcgacatgatgggtatcattaatggcaaaatgttcattgaccgattaaatcagcttggaaatgagatttggcttgatggtgaaaagatcgagggacagatttctgaacatcccgcatttaagggccttctggaaacgaagcgctctctttatgatttgcaaacgaaaccggacatgaaagatcaaatgacttacagtcttcccggtaaaaaagaacgggccgggctttcatacctgcagccgaaaacgaaagaagacgtaaaaagaagaagaaacatgttcgaacattgggccagacacacgcacggaatgatgggacgaagcccggattatatgaataccgtgctgatgagcttcgcctcctctgccgcgcttttgaaagaccgcgatcattgttttccggaacatgttcaagcgctgtacgaacgcgctgctgcacaggatctttcttttacgcacacgtttatcacccctcaggtgaatcgttcacaaatgggtgtaaacgtatcgccgacacctatctcggcaaaagtcgtcgataaaaatgaaaaaggcctcatcatacacggcgcccggattttagccacacaaggcggcctgacggatgaagtgctcgtggtttctctgcctaaaatgtattttgaatcggatgaagcgttcgctttttcaatcccttccaatacaaagggagtaaaattcatctgcagggaatctttcgtactcggaaaatcatcgtttgattatccgctcagctcaaggtatgaagaaatggattctatcgttgtatttgatcacgttttggtcccttgggaacgcgtatttttttataataattacgaggcggcttttgattttaatatgaaaagctcttttaacgccttctcatttcatcaagtcatcacgagacaaattgtaaagacggagtttctcctgggcctcgcccaaacgcttgtcgaagcgatagatgtgggcgaatatcagcatattcaggctaagatggctgaaatcatcaccggtctggaaacgatgaaagcccttttggaaaagtcggagaatgatgcggaaacagatgaatggggttatatgcgtccgagtgtcactccgcttcgtgtggtcagcgcgatttttcccgacatctacccgcgcttcacggaaatcattcagctgatcggggcaagcggaatggtgactttgccgactgaaaaagcgttccgttctgacatcagaggagaccttgaccaatatttgcaggcggccgaattgaacgctgaggaccgggtaaaagtgttccgcctcgcatgggatttgaccatgagcccctttggaacaagacagacacactatgagcggtacttcttcggtgaccccgtccgcttaaccagccatctgtacagaagctatccgaaagaagaacagaccgcggtcatcaaggaattcctgcacattcataaataaaacaaagcagagagcgcatctctgcttatgatagctggatcggctgccgccgatcctattttttattttggctgatcaccaccatcgtaatatgcgataacgcgaaagagacaagcgtatacacaacggcccacccgataaacgagaaattcaatacggtaaaggtgcatataaggcaaacggccaaagcggcagccggcataatgaacgcgtttttaaacaggtacgttccggcgactgacaagatgatgatacaaagcggcagaacaccgaacgcaaaatccaattcatcaatcaacagatgcactcccttcgcttttcttagtccggcctaacacatcttatgcctgagtacaaaatcgagtacttcaaatctttcgcgctccggctgattttccctccggttatttattcaaaaaaatgaaaactttccttaaagcgtttacattcacgtcagactgtgataatttaagaaagcgctatcatacacaagttaatgatttttggatggagatgaggagaaccaggaaaccccgccctttcacaagggtgatttctggttctttttgtcattttcaaggaaaggagtcatacatacatcatgatagacgttcagcaaaggggaggatatgatgtttcaattgtttaagccggctccgcatattgagagattggatgattcaaagacggatgcggcctataaacggctcaggctgcaagtatttttggggattttcatcgggtatgccgggtattatttgcttcgcaaaaactttgccttcgctattccttattttcaggaacaagggttttcaaaaggggaacttggcttggtgcttgcggccgtatcaatcgcttacggcttcagtaaatttattatggggatggtgtctgaccgctgcaacccgagatatttccttgcgacaggtctgtttttgtcaggtgtcgtaaacattttatttgtttccatgccgtgggtcacgtcaagcgtgacgattatgtttatttttatgtttattaacggatggtttcaaggaatgggctggccgccttgcggacggacgatggctcattggttttccatcagtgaacgcggaacgaaaatgtcgatatggaatgtcgcccataacataggcggaggtattctcgccccgctcgtgactctcggcatcgccatgtttgttacttggaaaagcgtgtttttctttccggcgattatcgccatcgtcatttcatttgtgattgttcttctcgttcgggacacgccgcaatcctgcgggcttccgccgattgaagaataccggaatgactatccgaagcatgcgttcaaagaccaggaaaaagagatgacgaccaaagaaattcttttcaaatacgtgctgaataataagtttctgtggtatatcgcatttgccaatgtctttgtttatttcgtgcggtacggtgtcgttgactgggcgccgacttatttgacggaagcgaaagggttctctcctgaagattccagatggtcttatttcctttatgaatatgcgggaattccgggaacgattttgtgcggctggatcagcgaccggtttttcaaaagccgccgcgcgccggcaggcgtactgttcatggccggcgtatttatcgctgtattggtctactggcttaaccctgccggtcatccgctcatcgataatatcgcgctgatcagcattgggttcttaatctatggacctgtcatgctgatcgggcttcaggccattgaccttgcgcctaaaaaagcggcgggaacggcagccggcttaaccgggtttttcggctacatcggaggctctgctttcgccaacgccatcatgggttatgtcgtagaccgctttgactggaacggcggctttatcatgcttatctcctcatgcgtgctgtccatcgtcttcttggctatgacgtggaatacgggcaagcgggcggagcatgtgtaagaaaacaacataaaagattaatatttttgcagtacagcatttacaacgattttctacactagagacagatattgatttttaagggggaagaaaacatgcggaaacataaattgtttgctttggtattgctttcattcggtttattgtcattcatcgtcacgcctgtatcagcggcaggaaaaggaaacctcttgtctcctgacagaattttgaccattgcccatcgcggtgcttcgggatatgtcccggagcacacgatcctttcttatgaaactgcgcaaaaaatgaaggctgactatattgagctggatttacaaatgacaaaagacggcaagctgatcgtcatgcatgatgaaaaactggaccgcaccacaaacggacaaggctgggtgaaggatcatacattagccgagattcaaaagctcgacgccggctcttggttcaataaggcctatccggaaaaagcaaaaccgcaatacgccggacttcgcgttcccacacttgatgacgtgttaaaacggttcggcagacatgcaaactattatattgaaacaaaggcgcccgaaacatatccgggtatggaagaaaaactgatcgcttcactgaaaaaatacaaattggcaggtaagcatgcgaaacttggacaagttatcattcagtctttcagcagggacagccttctgaaaatcaaacagctcgatccgaaacttcccgctgtccaattgcttgaagcggaacagatgacgtcaatgactgacgcagatttaacggacattaaaacatatgccgtcggtatcggaccggattacaaagcgctgaacgctcaaaatgtccgaaacattcgcagccacggccttctgcttcatccttacaccgtaaacagcgaggcggacatgcgccgtctgctgaattggggcgtaaccggtgtgtttacgaactatgcggatatattccaaaaggttaaaaaagaatacaaatcataaagccacatgggttcggagatgatgccgaacccattttttttgcccgatcatgcaaacgccatcatgggttatgtagcgggcggagcatgttattaaaaggctgagactcaccttaattgtaaaaaggtatcactgtaatgatgaattacttgtgatacctttttaaacaaaggaatataattatttatttctattatctattttctttcttatactatttgtaatagacgataatacaagtgatactaaaccatagacaacaacccatccccaaaaggatagattaaaaacagtaaacattagtatgacagaaacaactatactgacaagcggcattatatacacttttttgaaaatataagtgaatataagtgaatataatcgataagacgataatagaaagtggtaaaataccaaaagcaatatctagctcatccattattattctcctttgtgaatttaatttctccttaagtatactcactcagctgtctagccatttatatctaatcaccccatacttctttgtttttcttaatcataaaaaagtcatattcagaaacatgggtattgttaataattttttcaagtcctctgataggagtagattttaatttttttccgtttttataagagtaagaattaatcacatatttcccacccttgcttatttctaacaagaaaatttcagactcatcaaaataagtgaattttgcttggttttcaaattttgtcgacctatttaacggaatttttttcccggcttcatacttttcaaatcgaaagtataaagtattgaattagctgccaaatgatataaagtgtcatttttcacaaaaaagttattagtggaaagaggaattgccagttgagaaatttcatcaaggatcttataactgcctaaaggatatgcccctttaaacttattatgctttaaatcaatttctgctactttgaattgtactctgtttgatttatccgtttggttatatagtataaaaaaggctgagctttttttaactattatttgtgaataaacactccaattttcttcatttaatatagaaattgttgttcctttccctactgtaactttatctttatctattttaataccctgaaaagtcggtgttttaattgaagaatcttcatttatcacgtaaatatattcaccgtcattaccagtacttgtatagaaacccggaataatcttttcatgaaatccactgccgttaccccatctaattaaactattataatggttttcaccgactccttgattattcaaaaaataaaagatattttcttttattaaatggcctgatgattgcccataacttgtatgtacttgatgctgcatcgggaattttttaaagttatcgcctatcatataaacttcttttttgtcctgtctaactatgtttttttcatcttgtgcaatggttccaacctcaatagcatctccttttacagctgttgctgctcctttttcatcaatgtatacagtacaactcccatctttaggataatctattgtagctgaataatatatagctgcaattttatcattcaagaaatacttttccttttctttttcagtttgtttaacgtcagaaactgaattagtatatttaaaagttccaatacatataaatatacctattaatactatgaccgcaattataataagccacttaatcttgttcaaatataatctctctccttaaaataatatgactccctaaataaacttagggagtgaaaataattcatctaaatgttttaatagtttttgtataattggaatctctgatgtctcttggatagacgcccatgcctttatctttatccatatctataccagcctttagcttaaaagctgaccataatagttttgaacagtttttatcaccataatgactcgattttctatttgttgcaaaattatatgaataaccatccttcccaaccctgctataccccaatttactgaattattttttttagaactagaaactttcacattttgaattacagcgtttttttcgaccttacgtttcgatgaagctattgcacgaacaccttttttagggaccgattcgacaatttgatttcccttatagtacataccgacatgtccatgcggaagcccaaaagtagatgcaggtgtatagtaaacattacctttagagcttgatcctataattttcggcccgctattcttgcccattgtgctcattctattacttttatcttctttatctagcttttcttgcttctttaattcagttttaatttcctctaagatctcattagatgttttattatcttgtttaactagattattaacggattcaattaattcttttttcgacagattcggattcattttcaatatgtagtttactgtttctgaattatacgagtccacagccttaacactcgtaaaacctccaaatactaagggagtaacgatgtataatgttgcaaaaaaatcttcgcattttcatacttattatccccaactatttactttcccatattttaatttattatacaattatttcaaacgcaacttacgtactgtattttctctatgattaattatttgttttgtcgctaaaactttgacttgaagtacaggaaaacggatgaagttacggagaagaaagaagttgcccaacatatcttttacattcattgtttaatatggaagacagttattgataaggcggagaaatcatgagaaaaaaagaatactgtccttggttgcctgtcgttaggctttctcattcatcgtcacgtctgtatcgaacccatgttttttgcccgatcaaaaaaccttgcgggaacgttaccgcaaggtttttattaatcattactcttttccggcagcggcttccgcctgtccgccttttaattgatcgttgattgctttggcgtctttcaaatactcagtcttgaatccgctcttcagggcccacgcatagaaggcaagggcaacgattgcgatcagccccatatcccatccgtacggaatgatgttcagaccgccgaatttttcacttccgagccatgaaatgaccatcatgctgagcagatagacaaccatccagacgccgcctttaaagtttctgcggaatcctttccacttcgctttcgcttggtagtagaaataaatcggaaggccgatcaaaatgataaacagcacctgccctgttaacggccagcgcgcccaatacagcacgagagacgcgaacacgaagccgagcggtgcaaccacgctgaggcctttcagacggagaggccggtacaaatccgccgccgtccgccgcagcgtcatcaccgtcacaggacccgtgatataagaaatcagcgtcgcaacggaaatgatttcagcaagcacgccccatcctctgaataaaaacagaaagataaacgatacgaccaggttgaaaatcatcgcttggcgcggcacgccgtacagcggatgaagctttccgaaaatgctcggcatatatttatttttttccatgccgtaaatcatgcgtgacgtcgtagcggtataagtgatacccgttcctgacggagatacgaacgcatccgcataaagaataatgacaagccagttgatattcaatgcgatcgccaaatcggcaaatggagagttgaagttcaggtgactccagccgtgaacaatcatggaaggttcaactgcaccgataaatgcgatttgcaataggacgtaaatgacggttgcgaccagcagcgaaccgacaaccgcaatcggaatcgatttgccgggattttttgcttctccggccatattaatcgggctttgaaacccgttaaacgcaaatacgatacctgatgtggccaccgccgtcagcacgctcgcccagccgttcggcgcaatgcttgaaccggatgtgaagtttccgccgtgaaaaccggtaaacagcaacgctccgattgtcagccccggaataatgattttaaagatggtaatcaatgaattcgcttttgaaaataagttaactgtccaataattcagtaaaaagtaaataatcagtaatacggatgcgaagccgagcccctctcccgtaagagtgccgttgtgaacgagattgcttgtccattttgcccattcccacggccatgagctcatgtattgaacagacgcaaccgcttccaccggaataacggaaacaatcgcaatccagtttgcccatcctgcgataaatccaataaatgatccatgagaatattgagtatattttaccattcccccggcttccgggaacattgaacccaattcactgtaagaaagtgcgataaacaaaataacgatcataccgataatccaggaaataattgcggcaggtcccgcaatctgagccgcccgccacgccccgaataaccagccggagccaatcatcgacccaagtccgaccatcatgagtgcaaacgttcccattctgcgatgtaattgattcataaagttaacacctttcaattaaaatatgactccagcgctatcatatatttataatattattctgaaaatagttttgtcaatctttatcgcattaaagcagaaagccaaaattacccttccgatgtttaaacagccgttaagcgggaataactactgcaagccagaaatagaaaggagtttttatcgtgaaacaaaaactgctcatttcaggacttgccgtgtcgactgtcggagtgacttcctacctgctcaaagataaatccaaccgccaaaaggtgatgaactttatccgcaatatgaaaacatcgctctccgggaagcaggatattgaatcattccccgtcaacaaagcaggcaacccgcatcccgaagatattgaagataacaaaatggtatccgaaggctccatgtacccggttcaatattatgatgacaagaagaaatagtctgttcccgggctgcccggccgtatcaaacggcggcagctttttttatgcagacggcgtttgatagatccgccaatattggcgcgatcctttctcccgcacggtaatgcccagtttggatatttccgctttcagctctttcgcatcagccttttcctcctctttcagcgccttttctctcgctttaaaaagagcatttgcccctggctccaaatccggcgtgtccggcacccaccgtttgtattcttctttaaaaggatcttccgtccccagccagacatacccatgcgcgcgaaacgcatcagccgctttttcaaccgcgggctcaagcttctcccgaaaaagctcctgcccttcagtccccaataagacaagatgcttttcatccgtaaacacaccggaaatgctgtctttcgaaaacacgctttcttcattatatatggttaaggacacctcgctgtccgtcacgaccgccgtaagacattctttaaaaacagtccgcgtcagccacattcccccgattaagccgataacggcggttgcagccgcagccttccatccgtgaaaagaagcgatcatttccagcggcccgataacaggcagccaatccaatgttacggcccacttcgcaatgaccggcagaaaccatccgatgaccagccccaataatggcggcatcagaaaaactaaagctttttcaaccgatgacaactcaagaaccgtctgtttttttatttcgttcatgtttctcctccgtctgtgtttttcacaactatccattatacaaagggttggatgattctgtaaactgtttccgaaacaataaaaagcctcccgaccgccgggaggctttttaaaacaggagctcatatacttcattcaattccatcgtgcgcttctcatcctgctcgttctcagcatatttgatttccttttcaagcagttgattcagcgcgtccatttctagatcatttagatctttcacgaactcgccctcatttgcataatgcttcacctgaagctttttataaatcccccggcacacatcatgctccaagtggttcgaaagcgactcgcgcaaatatccgagtgtcctgtccatcatgtaagccctcccttttctttaggaatagcttcccggaaagagagaaaaactatacatgaaagcaccgggcggctgttttaactctgtacctgaatggagaaaaatccgctgcttaacggcgtgtacggcccgttcagccccgttgcggagaaagagaacgttcctgaactgacataagaaagaggaacgctgtaatatttaatatagcctgtaacgatattgccgttttttgtatattcatcttccagcgcttttgacgtaagatttgtaatattcgttccgttgttaaacgcctggatcgtgttattgttcggatacccttggaaatatacggctaaataacccgttgtacccttcatcggttttgatgcgctgatttggttcggcccgatattttcccattggtaactctgaccgtcagacgtcacaccgataatacggatttgtgttaaagcaggagccggcgccgcagacgctgatggagcccacaacccgctcacaagcaacaaaacagcggcggccgccgcgaatagcataacgagtctctttttgtttttcatgtttcttccccctcttattcttttcgtagaatcctatactattttacacgatttacaaggaaaaagattacattttataaaagagtccggaacactttgtgaactagatatgaaacgctcttgaaacgccgttgatcatgagaaagatgccgcagattcttaacacgactctcgaacttctgtcatccttaccgaaaaaggtttttccgagcctcccgatccatacgttcattgcggctcccgcgagcaattctatgattccgatcatttctgccatatacaaagcagccacccttctaaccgttttttttcatatgacggcttatcatataaagtgataagaccaatgatgctgcaccggcagcaagaaacaggctcagcggcacgatctgcatgctgcctccgccattgttttgaaatgcgccgatcgcccatttttcaggagtaaacaacgacagcatgcgcatgtactccggagccgcgtctaatgtgaagaaagcccctcccaataaacccgtgacagctataaaaacggaagcaagcgacgtgaattgcttttggctcttcatgaacggtatcacggccatcgttacagcagtcagcgcaaacgagcaggccgcaagcaccgctcccgcagcaaaaacatgatcagcaaaacggatatgcagcatgaatgttccggcagcgaggatcacgataatatggagaagtccgaaaagatacgccgccgcaaacttagagattgcatatgccgtataggaaacgggcgtgctcagcaatctgtcatatgtatgattttcttgttcatctataaatgatcgcaggctttggactgcaacgaaccagataaacatcactaaaaatccgataagtctgtcggctgcctgtccgccttcataaacgtgatggcggtcaacattgacagcggaatgaccctgaatatccttcaagagatcagctgccgcctgcttcccgtcggtgtgcagcgtgcgggatatcacttttgcatcgcggactatttttttcagctcgcccgcctgctgcgcaatcagctgctctgtcaaaacagcatcacccttttcttcattctgaataaatgaaacgttcaattcatctccggaaaataatgtctcttcaaaatgagagccgatcagcaatccaaaggatatatcctgatgatgaacctttgtttttaatacgtcctccgtgaccttcgtgacttttatatggccggctttctgaatcattttcataaattgcgctgaataggcgctctgatcctcatcagctacatatacttccttctgctgactgccatccgcagaaaaggaaaagaaatatgtgagaaggagcggggcggaaatcgtcgcaaagatggcagtccgattttgcagcatcagtttcagctgatgtctgatcatgaataacagctgcgtcatgaaacagcctccttccgtttaaacacccagatggtcaaacataaaaacacggcgccgatggcggcaagctctgccaaatccgtcgaaataccgctcagaccggcatgctgcgtgacactgacatagctgttgatcgctttgccgttcggtatcagctcctgcacgattctcaaactgtcaggcaagctgtcttttgcgataaagcttccgcctaaaaaactgaatccgtataaaatgggagccgccatgcttgagacggtctcgtggttttttgcagtaaacccccaaagaagcacgatactgccgatcgcaaatgaataaacaatcgtaaccagcaatatttcaaacaaattgccccattttacctgatacaagatgctgcttgcgatgatgacggcagccatttgcataaggatggcaagcatgattcccaaaagcttccccgccacatactggatacgtaaaacaggcattgatttgattctgaataacgtgtgctgctgtctctcttccactatcccgtgaatgagcgcaaacgcggtcataatggagaacatgacgaccattgcgattgaataatactgcatcgcatcaatcggagccgcatgattgccggccgactgtttcggaatggtgacagcctgttcacccgaaaggccgctgatgattttgctggcatctccctttgacagatgtcccgactgcttcagcaccgctttttcttcactgatctccgcttttactctggtgacaaacgaatcggccatcatttccacaatgtctccgtttacagagccttgttggtccgagatgactttgatacttgttttttcattgtgttccgccgcttttgcaaagcctttcggcacgtatacaaaaacggagactttgccgctttcgacaagctgtttcccttcttggtaactgcctatgtcttttacacggatgagatcagtttgtttcagcacgtcattctttaatacgtcgcccaaagaactctgcgcgtgatccgcattataaaacgcggtctgaaatggcttcactttcgaatcgccgtgaaaaaccgttcctaaaataaaaatcatcagtgccggaaacagaatcagttttatatagaaagactttgctccggccaataaccgaaaatctaataagatcagcctgaataatattttcatgacgccccctatgaatcccgcagcgttttgccggtgagccggaggaaaatgctttccagattggcttcctcgaaatgaatgcccttaatggtgataccggtcttcctgatatcatccgcaatatcaaggatattgcgatctgccgcagagacgagcatcgtaatggtctgctggctgacagcagcctcggcaacaccgggaatgcggcggatttttttaacggcatcatcattcagaccctctgcattcacgatcagggtatcagaggctttggctgactgcttcaattcgtctttcgtcccgcaggcaatgattgagccgtgatccatgatcgccgctttttcacagaggtattcgacctcttccatgtaatgactcgtgtagatgacggtcatccctttttcttgatttaacgtcttcacggtttcaagaatatggtgtctggattgcggatcaattccgacggtcggttcatctaaaatgaatagtttcggttcaatcattagcgcggctccgatattcacccgtcttttcatgccgcctgaaaactcagatatcctttgatttcgctgttcctttaattcgatgatgtccagcacttcatcaacccgtttacaaagttccttaccggaaagtccgtacagactcccgaaaaaagccaaattatcctttgcgcttaacgcttgatataaagcgatttcctgcgggacgactcccatcactttttttatggccgcaggctgctcctgtaatgaggttccgtcaatgcagattgttccgcccgtcggcgggagcacggtgctgatcatcgacaccgttgttgatttaccggcgccgtttggtcccaggagaccgaatatctctcctttttcgacgcgcagtgatatatgattgacagcggtaaaatcgccgtacttctttgtcaaatccgttaattcgagcattcgtgcagcactccttgtgtcatgtctgcacttattctactcttggcgatccttgttttctattcactttcgtactcgatatgggtattactttcgtcatatgtttagtgataaaaagggagagaggagggtgaagcggggttatagcagtttttgcaaatataaggtaagctcggttctgtttgacacttcaagtttatcgaggattctggatacatagtttttcacagtgccttcagtcagaaataagtctgcggcaatgcgtttattgcttttgccttccataatgtgtttcgccacatcaagctctctcggcgtgagaatctccttcagctttgaccgcggctctttctgcaccgcagggatctccatattgttcagcgcttttacgacggaaaccgtgattttgggattcagcatcatcttgccttcataaacggcttgaagggaggcggtaatttcatctgaatcagcatccttcaagagatagccgtcggctccgcttttcagcccggcaaaaatatagtgatcatcttcaaacgttgtcagaatgatgacttttacggacggatatcgcgcttttaccgcttttgtcgtttcgattccgtccataccgggcattctgatatccatcaaaatcacatcggtttcggtttgagaaagcagtcggagaacctcttcgccgcaagaagcctctcccgatatttgaattccttcatgaagactcagaatcattttcagcccctctctcacaatggactggtcgtctgcaatcatgacattcacttgattattcctccttgcatggaatccttattttcacgtcaaaacccgtttccttcccggacgagaaaacagcctctccgccaagtgcggccgctcttttctcaattcctttcagaccatttgattttatgatcgttccgcaggctgagccgttattatgaatatgcgccaatatcatgtttcggtttttttgaatccggacagaaacatatgaagcatgtccatgttttatcgcattcgtaatcgtttcctgaacggattgataaagacaatgcttcacatccggctgttccgcttctatggccgcgtccatctccagctcgaagcgtatgcctcccgcctcttgaaaatggctgaaaatgtcacggagctcttgctcaaatccccgccccggcaaagagccctgcagcagcataacggcctggcgaagctttaaaatggattctttcgtaagatcatgcgccttatgaatgatctgcttcactttgtccggctgatgcccggctgtcttcccggcaaattccaaattcattttcagagcagccagataatgaccgagagaatcatgcagctcctgcgcaattctagttctttctttcgtaacggccagttcctcaatccggtctgaatattccttcagtgtgtcattagcgatcttcagctctcggttcagcaattcaaccttcgacttctcctgcaggtttttccgatataaataaatcaccgcaaacatgatgaagtatggcggcacgatatcactgacacccgctccgccggcgtataaagctgcggcaaatgcggcggcattcatcgttaacaaaacagccgaaatctccttatcagtaataagcacctccgccaataaaagcaccattacggcctgtgcccccacactatagacattgtacaaaagtactcccgcgatagcgttgctcaggagaaaagagccttgatatacagccggccttctcttcatatatagcggccgcaggtagtcattagccgtcagcatcatcacgagcacagacaaaaaaaccttcagctccccccggccgggaggaagctgaagaatcgcatgaaagattgatagtaatgcaaaacccctgatcagtaacttcgtatgtgcaatcttcatcgaattctccttacaaatgagcggcggctttccgctccacgttcagcacatcatacagctcatcaagcgaatgaatctcgtacgtcgggatgattccggactcatttgctttctttccgggattaaaccagcacgtatcaattcccgccatctgaccgccttttatgtccgcgctcagtgaatcgccgataataagtccgccctcggcagaaaaaccgggaattctcgcaaacacgtaatcaaagtattccttcatcggcttttgaaaacccgtgtcctcagatacaaacacatctttaaagaacggatacagaccggagtcgcccagccgcttatattgtgatcttgagacgccgttcgtcacgatgtataaatcaaataaaggactcagccgttcaatcagctcataagctccgtctatcatctggtgcccttcttctaagtattggcggtacgcctgattcatcagcacgccgtcggcttcgaggccgtattctttaaacaaaagggcaaaccgtgtattcaccacttcatcgcgggtcatttccccctcttcaaacgccttccacagcccttgatttaacgctttataacgggcttccacctctgccgtcagctccagctttgaaccttgaaacaatttttgaagagcatcggtttctgaagcggtaaaatccagcagcgtattgtctatatcaaataataacgtacggtaatgactcatcgatgtttcccccggttctgctttttttaaccagtataccactcgcggacaagccgaaaaagacacccctgtaagagagtgtctttttgaattatacagcgtcttctattttcgatttttcaccaggcacgcgcttgccgataccgaacgcataatagctgaccgtcacaatcgccaggaaaatcaccccgacaaccaaagaaatccgcgtatctttgttaaaccacatgccgatcaataccatgagtaagaaagcgatcgtcaaatagtttgtaaacggcgcaaaaggcattttaaacggatgcttatcaagctcagcgcccttcgctcttctgaaaccgagatggctgattaaaatgacgaaccacggaatcattcccggcagcacactcgcgctgtacacatagacaaaaattttcggaggcgcgatgtagttcagcacgacaccgatcacaagtccgattaatacggcaaacgtaccgaatatcggcacaccgctcgaagaaactttcttaaagaatttcggggcctgtccgttcacgcccaatgtataaagcatgcgtcccgcactgaatatcccgctgttgcatccggacatcgcagcggtaatcacaacaaagttaatcaaaccggccgccgccgtaatcccgactttcgcaaatgtcgaaacaaacggactgccgagtgagtgaagctcattccacggatatacggtaacgattacgaaaatcgcaccgatgtagaaaattaaaatccgccaaataatactctgaatcgcgcttcgcagcgttttttgcgggtccttcgcttcccctgccgtaatcccgatcagttcgaccccttgataggccgcaacgaccaaagacaaggcaaagaaaaatcctgaaaaaccattcgtaaagaaaccgccgtgcgaccataaattagataatccgatcgcatgccctccgttaccgaaaccgaagaaaataattccgattccggccacaatcatcagaataatggtgacgattttgatcatggcaaaccaaaattcaaactcaccgaaagattttaccgaaattaaattcgccgcaccgagaatggccatggcgataataccgggaatccatgccggcagatcaggaaaccaatatttcatatacgaaccgacggcgataatttcagacatcccgacgatcacccattgaaaccagttgctccacgccgtcatatagccggctaacggatgtatatacttatggccgaacgtcgcaaacgaccctgtactcggctctacatagagcatttcgcccatcgcacgcatgataaaaaagataaagatacccgagatcgcataagccagcaggacagacggcccggtccatccgatcgtgctggatgaccccatgaataaaccgacaccgatcgtgccgcccagcgcaatcatctgtatatgacgcgcgcctaagcctctctttaattctttgtttgccacttcgcttcctcctcttaacagctctgatatatgtgaaataatgaagcagaaggtgcacctgttgaacctaactcactcttcatttcccgcaatattagaaatattctatttttctattgttgtataatctccaatttccttatttcatcataataaatttccgtggaaaatacaattgtttttttcaggtaaacaccttgcaccctaaaccaacaaactaaaaataaagcgctttcatttttattgaattatgaatattgagataataaatgtcacagcctccgagaaacaggatgtccctggagaaacatgttccgccccctattcaatattatttttgctaagcagaatggcgtaaagtcttactctcttccattctcccttgtatacgccataatcctgcttaaccggcaaaaatcatgcatcaatcgataaatgcctcattcagccgcagcaaaagccggccgaacttttctttttcatcgcctgaccaatcgtcaagcatatgtcggtatcgatcaagacgcatctttttatcagcttttaacctctgtttgccaagcttcgtaatcgcaaacagactgacccgcccgtcagaaggatcggaaaaacgctggatcagctctttcgactccaaggccgcggcctggcgtgacaatgtggaaatatccagcttaaaagattcggctaattcctttacacgcgccggtccgaattcatccagctgccgtaataacaaatacgcagccctttccagatgtccgattttacggtcggagttatcaagataaacagctctcctgataaaagtggtgagctcatattcaattaattcaatcggatcttgttttgacaacagcctcactccttacattgacaacagcaatattagttgtataatacaaacatatgcacatttactcagaaaacatatagaaagattttgcatacatatatttgtatagtacaaatatatgcgcaaaaagtaaagaaacatatcgaagcatcaagaaagggggaagctgctcttctccaaagaacagcattgtcgtgaaagtcatacgcatcatcttgcaaatcattattttattcgcattttcctttatcgggggagccgttcagcagttctttcacctgcccattcccggaagtatcatcggtttgatcctgctgatcatatgtttatcggttaagatcattcccgtcaaaatgattgaagacggagccggatttttgctgtcttttcttccgctgttattcattccggccatgacgggcgtcatcaattacccgtcactgttttccgccagcggggctgctctgtttctgatcatcgtgctgagcaccatcgtcacaatgatcgccgcagggtacgccagccagctgttagagcacaaagccaatcagagaaaggagaaaaagaagtgcagcaagcatgtatcgcaatccttataattttgttcacggccgccgcctatctggctatggtgaaattatatgtgcgctttccatatccctttctcataccggttttgacgactacgattttcattatcgccgtgctgcttgtttttcatatttcgtataaagactatatgattggcggacgatggatcaattcactgctcggccccgccgtggtggctttggcatacccgctttataagcagcgccgggtattaatcaagtatatgtttccgatcatcggcggcgtgttggccggtttattctccggaatggtcagcggcctgctatttgcagagctgttcggcatcagccggagtttgattttgtcaattatcccaaaatcaattacgacgcctgtcgccatacagattgcgtccggtatcggcggtgtcccttccatgacagtcgtgttcgtcatgatcgcagggttttccggcgttatcttaggaccgctgcttctcaagtggatccgcattcgcagctcactcgggaaaggaattgcattcgggagcgcttcccatgcgctcggcacctcaaaagcaatggagtacggagaattaacggtctccatgagctctgtttccatgacgctctgcgccgtgttagggtcggtcttcggccccgtcgtagcatggatgtttcaaatttaaagctgacggttctccgtcagcttttttcatgtgcggatcatctcatttccttccattattatgtttcatttgtaagaataatggtaaagtagaaaacaaggagggatttaatgatgactggagcaattccgcaaaagaaactgctggatgggacaagcattcccgcgatcggcttcggtacatacgctcttaatggaaacaacggcgttcatgccattaccagcgccattgatatcggctaccgtctgattgacaccgcttataactatgaaaatgaagggacggtcggagaagccatcaagagaagctctgttccgagagaacagctatacgtgacgtccaagctgcccgggcgctaccatgactatgacaaagctgtacaaaccatccaagaatctttataccgcgccggtctggactactatgacctgtatctcgtccattggccgaatccgaaacaagaccgctacacggaagcatggcaggcactgattgatgcgaaaaaatggggcctgatccgatccatcggcgtctgcaatttcctgcctgagcatatcgaacggctcgaacgtgaaaccggcgtaaagccaggcatcaaccaaattgaactgcatcccgcttttaatcagcagcagcagcgccaatggcacgaagaacagggcatcgtgacagaatcatggagtccgttatcccgcgccggcgaagtattgaacgatcaaaaactcggacggattgcggacaaatacggcaaaaccatttctcaggtcattttacgctggcatatccagctgggcgccatcccgattccaaaatcagcatcgcccgagcgccagcttgaaaacatctctgtttttgatttctcccttaatgaaaacgacatgagcattatcgactcgcttacccgccccgacggacgcataaacagccaagacccggcggagtatgaggagttttaagtaaacgcataaagaaaagctgacggcatcattcgtcagcttttttctcattttatatacgcacacccagctcccgtttccattcagaaagccaatctgtatccccagatccgtattgcctgctttggccgacatcacgcagagatccgtttttatactcaatggacagaaccaaatcaggaatggcatcataacccgttctcgcaagcttcgtgagcccctgtccgtaatgggcggccgcttctgccgccgtatgtctcaacaaaggatcttgctgcagcgcttccttatagacgtctaaaaggtcacggccgtcttctgtgacgtactttccgtccacgatctgcaagtctttcagatgatagccggtcacctcatacatttcccgaacgacttgatatttctcatatgtttccggcgtaaactgtgaggagtcatcactccggctgcgaatgatgtgcgcaaacagctctttgctgttttccccggagtttaagacagcttcaatctgctgagtgagctctttatcgtcagtcccgctcacttttaacagataatcaatcggtgatatcgtaaatgtaagattcgcaccctccggaatctgaatatgattccgatgaaaaagcatatctatctgctgattcacctgcgcccgctgaaacaccctttcattttcgacttgaatctctccgttgagcgtttcaccccgaaacgccgcatcacggaaatcatagctctgagctttccccttaaacagccattccgtttcattatgataagcggcctgacgctccgattctgataaatcacttctgaaataaggtgaatcggcacgctggtatttgtccttaatataatgcaaaggatctggttttcgtttattgatttcattgatacggctgtatttctcatcaagaatcttgctcgcaatatcactctcagactcatacggattattagcgtctattaccgtctcattcccattatccgtaatcgttttctgatttgcagattgatataaacgggacaggctgctccctttctcagtgacaccgctccttgaataattcatctggctcagatcgcgggttccgcttgcctgaatcaataagctgtccggcccttttgccgcatctttcacatttgttttggaagaataccgctgaagcacttgctgagccattacttgattttttatataacgagcgtttaggcgcatgtttttaacctccgcttgagatgatgttctagtgtttgtatcggctgtttcccagttgattttaacctaaaataacaaatgtttacatcacgagggtttttatgtatgatgtagtcaaaaaggaggaattttccacgaaaaagtatatatctatactatttgtcagtgcaatcttattatcaggcgtattgtttgcaccttcagcctcagcctctgcgtctcaaaagaactcatcacaaataagcgctattacaggaaatcactcatttgaaactgctaatccagtaggctactggaaatataaaaatattgatacagccatattgccaaaaggggaaaaagattcgtatttcactttcacggcaaataagggagaaagactttatgtcaggagttcaacaagaagtgaatacaagggaatggacattgaaatttataataaaaataaagtactgatcagtaaaggcacagaagtgataaatcctgatacggcgctaccttttatctatgcgaatacagatgcgaaagaaaataacgagacgttctacgtgaaagtgtcccgcggctcctacactgacgatatgtactttacactctctatttacgaccgaatcaaatccggcagtgagaccttctcattcagcggtacagctgaaaataaagggaacacaagcctcagtccgaatggatcagattcaactgttcttagactcgacttaaccaaacagacaagcattccaagagacgccacagtgaaaagaatcaacaccaccgcaacccaaacaccaagccaaggaaatacaagccactacatcatgtcggaagaaaataaagtgtggcaccgtgcacttgcaaacagctccacacaagggaattacggtattacactggatgataacctctcagcggcaagcatctggaattttaaatacaacacacttgcaacagctaaatcgactatgaaaaatgtaaaattgaagattgattatgagtacgatgtgacaacgcagttttaattagaagaacagccgcccatttaggcgggcggctgtcctttttgaattaaaacgaggtttatttattaatttggactttattaaacaaaagtatagactcataagtgattacaatagtgactcatgatttttcatttcaaaaaaaccgtactagttgatattaattttattcacatttaatcagctttctctgatttagacaatgatgcctgatatccttttataaaggtattcatcagaattatggatttactagcaaaatactcatcattttcaccttcaacttttaacttatgcaatgtacctaaagctctgtaaaacattaatataaacaaatatatacatgtgttcacctcatgtatagttctacttgaatatctagtgattttaccaaataagcttaatgctaaattctcctcgccatttattcttttaaccattgctcctaaaatcggatatggataagtgttatgtaatatttctgaatagaatttatatatttgttttctatttttattcaattcatctttaattgactgaggtagctctgtagcattttcgatttcattcaatttattcctaattttgtatggtctaaaatatttttcatatttgtcgccttgaatatacatccgtaaccactcttcatcatatattaagactaatgttaaccatgacatctcagctaaatttctaaagagtacccttgcttgatagtctaaacccctttctattagttttgatattcctatcagtccattcgttaattgtgtaagtaaaccctgaaatgtttgatttattctttcatattcttcttttgtccagttaccagcaataaagtggtcatgttcaccaatccaaaaaattaaggttcctatacacttcattcctacatctatcaaagataactcttcactaaaaaaaaccttttctttatcaatctcatcgttaattgattttaaatcagcctctaggtgttcaaagtcaactaatttaacatctttatttaactctttattgaatttttttatttcatcctcaagaatatttaataatttttcgctaactaagttcattacctcacctaccgcaaattaatactattaccctttatttcaaagaattagctgtataaattaactttataaactcgtctgctaacttccgcacacaactttggttacgtacagttgcccacttcatttttcgttcaagtataggaatcatatattacaatcttaaaattaattatccaaaacttatcttgatgtctatttgataacttttcacttttaagttttatttcacaacttaaaagttatcttctaaatcctttatcaaagcttcatcggatgtgaaaatcggtatataatccctgcacttttactcgtaatccttcaaattactaactttactgctactcatatcacagtattagcatttcgaataccttgacttgaattgtttctactattatcctattttattatcaaaaacaatgattaagtttcagtacatagatcatctccaagttcaattgatttaggttttatccttaataccccaatttttccagtcttgaattatctgtcagcactatatatgctacagatgcaattttttcttacttttcaacatagatatcgagacccttgatcttcattgatattccgctaatgctgaaacagaagcactttttatttcattgaaaatattgtttttcttatggacataaaaacccctctggctaataaccaaaggggttaaatatattattccaccgtaacactcttcgcaaggttgcgcggtttatcaacgtcacagccgcggtgcagtgcagcgtagtaagcgatcagctgcaatggcacaacagataccagcggagcaagcgcagggttgacttccggcaggatgaatctgtcgtctgcgtcttctaagcctttcagcgagatgatgcaagtgttggcgccgcgggctgcgacttccttcacgtttccgcggatgctcaggttgacgtgttcttgtgtcgccagcgcaaagaccggtgttccttcttcaataagagcgattgttccgtgcttcagctcgccgccggcgaagccttccgcctggatgtaagaaatctctttcagcttcagggcgccttcgacacatacgaagtagtcaaggccgcggccgatgaagaaagcatttcttgaaacagtcaggtactcacgcgcgatcatttccatttcgtccttctggtcgcagagggcttccatggcgtttgccgcaatacctaattctttgactaaatcaaaaccgatatcaacgccgttgcgttctgctgcaacggacgcaaggatcgcaagcacggcaatctgagccgtatacgcttttgttgatgcaaccgcgatctcagggcctgcgtgcagaagcaatgtgtaatccgcttcacgggaaagcgttgatcccggaacgtttgtgatcgtcagcgctttgtgacccagcgctttgacttgaacaagcacggcgcggctgtccgctgtttctccgctttgagaaaggaagataaagagcggcttcttagacagaagcggcatgttgtaggagaattcactcgctacatgcacttcaaccgggacgtttgcccacatttcaatatattgtttcccgacaagaccggcatggtagctcgttccgcaagccacgatataaatacggtccgcttccgccacggcgtcagcgacatcgccggccacggccagtctgccattttcgtcttgatacgtttggatgattttgcgcataacaagcggctgctcatccgtttcttttaacatgtagtgagggtatgtgcctttttcgatatcactggcgtcaagctcagcgatataagacgcacgtgtcatgacttcaccgtcaaggtttttaatcacggcttcgtcttttgtcacgatcaccatttctttgtccaaaagctcaacgtattcattcgttacttgaagcatagccatcgcgtcagatgccacgacgttaaacgtatctccaaggccgattaacagagggcttttgttttttgcaacgtaaatggtgtctgtgttttcaccgtcaaataatgcaattgcgtaagagccttttaacagagtcagtgttttgcggaacgcttcttctgtgctaagtcctcccgccacaaattgctcgatcatttgaacgactacttcagtgtccgtgtcgcttttcagttcaacgttttcaagatattcgcgcttcagctgaacatagttctcgatcacaccgttgtgaacaagtgtaaagcggccgagtgcgctttgatgcgggtgagcgttcaggaagcttggttcgccgtgagtcgcccagcgtgtatggccgattcccgcttgagattcaaccgtgtgatccaccacttcacgaaggtcggcgatgcggcctttttctttgtacacatgcacgccctgctcattcgccacagcgataccggcagagtcataaccgcggtactcaagcttctctaatccttttaacaaaatctctttcgcatcaagctgaccgatgtaacctacaattccacacatattttcttcctcctaaaggtgcaaaaggagacgaagaaagtcaaattacaaggggactttcaatcgtcccctcccacatgtttttttggaagatcatgtgatttctctttgttcggagagtcgcccctccggtttgaagaaatccttacggctgtgatctaaatgaatcagccgggaggcatccgccgaaaattcgataacctccatcctcgtcaactaagccgtttttcgggcgcttagttcgggcgctgtaattataaaagatgcaaacaatcccgcctttcctgcaagtgaaaaacaaaggctgaacaagcttgattttacagcatgtgccaaggacggtcaattattttttgccgccccggcatcatgtttactatcatattatgctgatcgcacttgtcttgttcgctctctgcttataaacttcgctactccgctcccatttctgtccgcacgacatccacgatttttgtgacatattcgtcacaaagctcttttgttctcgcttcggccatcactcggacgagcggttcggtgcctgacgggcgcactaaaatccggccgtctccgttcatttctttttccacttcagaaataacggccttcaccttagcgttttcttctaccttatatttatccgtcactttcacgttcactaagagctgcgggaattttttcatttcatccgcaagttctgaaagggttttgccggacgccttcagcgtattcacaagcatgatcgcggacaaaagaccgtcgccggtagtgttgtaatcaaggaaaataaggtgccctgactgctcgccgccgacattatagccgtcttttttcatcgcttctacgacatagcggtcgccgactgccgtttgaacgcttttgatttcttctttttcaagcgctttgtagaaaccgaggttgctcatcacagtcgatacgacggtatcatccttcagacggccctctgatttcaaatacttcgcgcatatgtacataatctgatcaccgtcgacgatgtttcctttttcatcaacagcaatgaggcggtcgccgtctccgtcaaacgcaaggccgatatcggcgtttttttctttgacgaaagcactcagcgcttccgggtgtgtagacccgacgccatcattaatgtttaatccgttcggagacgtccccattgtagacacgtcagcatcgagatcggcaaaaaggtgcgtcgcaatggatgatgtcgcaccatgggcgcagtcaagcgctacatgaatgcctgtgaaatcttcgtccgccgtctgctttaaaaattgcagatacttttgaacgccttcaaaataatcgttcacaagcccgaggtccgcgcctgtcggtctcggcagcttatcttccggttcatccataagacgttcaatctcggcctcctgctcatcagaaagcttaaagccgtcccctccgaaaaatttaattccgttatcctgtacggggttgtgagaagcggagatcatgacgcccgcctcagcatccatggctttcgttaaataggatacccccggcgtagaaataacgccgaggcgcatcacttcagctccgatcgataaaagtccggcgacaagggctccctccagcatatgtccggagatacgtgtatcgcggccgatcagcactttcgggcgctgcttatctttggtcaggacataaccgccaaaacgcccaactttaaaggccagctctggcgtaagctcgctgttggcaacacctcttacaccatctgttccaaaatacttgcccattttgtatcgctcctttttcattctgttgaagaagaatcagcgcttgatccgtcttcatcctggtcttgattttgatcctggttttgacttttattctgatcgctgtcagtgtcgtcttcccggttcttgttcttgtctttgtctgcgtctccgcttgtgccgttcttattgccggaatcagcggaaccgccgttatttttatttgaacttgagtttttcttagaagtcagcttgatcttaaccgtgtcttttgacagggaccatgtgacgttttgcgggccgtttacttctagctttacagagtgctctccgtcatccaagtccgagacattggcatacagttcaatgtccgactttttcagcgccttaatgttggcgggggagcctttggccgtaatatttatcgcctgcgattcaggatcgagaaactcaatctgctgtgagcctcccagtccgaccgtcttgattccgacattgtcaaaatcctttttgtcttcactgtccactttaacatgaagcgtgattttttccggtgataccttagtgacacccttaggaagcgggatatcggcattgatatcggtatctttatcaattttgcctaaatcaagagatacgccgtcaataaattcaagtgaatccagcacatcctgcgggccgtaaaccgtcacctcactcggattcgagtcaatgctcgcaacgctcactccgtccggaagacttcccttcctttcgattttgaaaggaagctttttgctcggactggctacgggaaccgtcactttaatgactgacggttcaacatcaacaggaagtgcgttgccgtctttgtcatagacggtcaccttcacttccttttcaatggtctcatttgcattttcaaggttcacggatgctttgacaagtgaaatgttatcaatcacatttttcgaacctgtaatctgcacgtttttcgggctgataatcggctgctgaggggtgtatccctttttcattttgcttttattgtagtattcaacttccacgggaaaactctcagccgttttttcctgaatcgtaaccgtcgtgactgacgggttaatggagatcgtcagtccgtccgatacgtttttcgccttcaattcgaccttatgagtcccggtcttcagcttattcatatcggcgtatatctcaaaattcttcgtctgtctcgcctttttcaccgcgcttgtcgagcctttaatcgtgacatttacggtctggggcacgccggtgacgacatagttcgcttcatcatagtatgcttttacaggaatatcagtaagcgtagcctcgtcagtcgttgatgtcggaaaaaaggattcccccggctttttcggagtcggcgcctggttgttgttaaccgcaacgtaaagcagcagcgcaaagagcaatgcaatgatctttacagcccagcggttgtttaagaatttatccatttttcttgcccctccagtaccagcggttagaagaagtatctctggcgtttttcttaaactcggcttcaagcatttctttcagtgcttcttccgtcaattctctgtgaaggtctccgtttttggccacactgatggcgcccgtctcttcagatacaataatggttaagctgtccgtcacttcactgatgccgacagccgctctgtgacgcgtccccagctcctttgaaataaacgggctttcagaaagcggcagataacaggcagccgccgcaatctcgttatttttcataatgaccgctccatcatgcagcggtgtattcgggatgaagatattaatcaaaagctccgagctgacctgcgcattaagcgggatgcccgtctcaatataatcgcccattcccgtatcgcgctcaatcgcgatgagtgcgccgatgcggcgtttcgccatgtagctgatcgattttgtaatcgcttcaattgtcttatgctgcgcttcctccacgggggttccgctcctggaaaagaaccggccccgtccgagctgttcaagcgcccgtctcagctcaggctggaatataatgatgatcgctaaaaatccccatgttatcgcttggtccatcagccactgaagcgtgctgagtcccaaatatgaactggccatccggaccaatacgatgacgacgattccttttaaaagctgaaccgccttcgtcccgcgtatgaccatgattaatttatatatcacataccaaacaaggagaatatcaacggcattgccgaggtattgcaaaaatgggatgtcctcaaaagccatttcctcgtcctccaagaattcagtcatttcgtttttctgttatgaattgtgctgcatgagcaatatgtacatcatatagcgtgctcattataccacattttgatttctcaagtgaaatgagccagagcggcgatgcacaaaaaaagagtaaagcgattatacgctttactcatcttcactcgggtccaaagcgctcacgacgccctggcccgccgatttcagttcgtaccagacccagtcaaacaattggttaatctcttcaatctgcccggtgacttgtccggctgaggccatgtatttttctccgttgacgacggtcacattgccgtcgacttttccttcaatgaacagcttgccgttttttactgtgacatcgccctttacggtctcgccttctgggacggtgaccgtgtgattctgcacgacaaggttcggctgtttggacacactgaaattgtggtcattatgccagctgttgaaaaaaccgccgcccattaaaatcacaaaaaccgctgcggctgcaatcatcggatgagttttgatccatcgttttacagaagcgcgttttttctcttttggaagattcgccataactttggcagtaaaatcagcaggggccgtgacatgcgatgtgcttcggacgagtgctacggatttctccatttcatgaaaatgccgtttgcaattcccgcatgactgcaaatgttgttttaatacgttttcatcttcaggaaggatatctccatcaagatgcttatgcataagctgcacgatctgttcaggacagctcatttcatcaccccacttaaagatccctcaattgttttctaagagcctctctgcctctgtgtatccttgtcttgacggtgccgacagggatattcagaatctccccgatttcaattaaagagagttcgtcaatatactttaatacaataaccgttctgtacttgtcaggcagctttaaaatctttttctgaattgtgtccgacagctccaatgacaatacggcgtcttcagggagaaccccgtccgcggcgatctgcgaatacatcgtcagcccttctgctcccgctacttctgcgtccagatagtaatcaggctttttcttgcggatgcggtcaatggtcaggttggtcgcaattctgtaaagccacgttgaaaactttctgttgatatcgaaactgtcgatattgacatacgctctgataaaagcttcctgcgcaatatcttccgcttcgtgaacattgccgagcatgcggtagcaaagctggtaaatcttatctttataaaggtcaacgatttctgcaaacgcattttgatcgccttttttgacttgcttgattctttttttaatcaggttttccatgttttatcttacctctgcccttcaccggtctgtatctatacgttgattgttttaaaaggtttcattttttttattacatttattttaccaaatttcaggcagggtgtagatggaaaatacagaatatactgccttaacagcagcttaaaaatagtatatctgatgaacaatcagaaatcgaaacaaaatgctgataaaaaaagacacctttatgcaaaaggtgtctgagactgggctagctggattcgaaccaacgcatgacggagtcaaagtccgttgccttaccgcttggctatagcccaaaaatggtggaggggggcagattcgaactgccgaaccctgagggagcggatttacagtccgccgcgtttagccacttcgctacccctccgtatatttttgaaaaacagtgccggccagaggacttgaacccccaacctactgattacaagtcagttgctctaccaattgagctaggccggcaaatatggtggaggatgacgggctcgaaccgccgaccctctgcttgtaaggcagatgctctcccagctgagctaatcctccatatgacccgtacgggattcgaacccgtgttaccgccgtgaaagggcggtgtcttaaccgcttgaccaacgggccgttgtgtccgcgtcgagctgacaaaagttattatatacaggttgtaccccatttgtaaagaggaaaattattttttttattttcaaacttttttacccgttttttaactgaaaaactcatccctcctctcttatttcatttatgatgaaagtatcaaaatattgaagggaatggacacagatgatcttagtcagctcttgtctcggcggtatcgaatgcaggtataacggctctcacgccgcttcggaaaaaatccgcagactcgtagaagaaaagaaagctgttatggtctgccccgaacttttgggcggcttcaccactccccgcgaaccggcggaaatcatcggcggcacgggcgaagacgtgctgaacggaacagcaagaatcgtaacggcatcaggcgaagacgttacggctttatatatggacggcgcggaaaaaacattagcatacgcaaaagaaataggcgccgccacggtcatccttaaagaaaacagtccgtcctgcggcagcagctttatctatgacggcactttctcagggaaaaaaataatcggagacggcatcacttccgctcttttaaaacgggcaggctgccgtgttctatcagaagatgaattggatcaattataaaaaaggagagtagatatcatggatgtagccctgtccttttataaaccggagcatgcagacggactgaacgggtttgtgctgagtgaagaagataaaaagttcacagctctcccgaaggatgtcctgccgcaggctcttgtcatccgggatcgctacccgacagtcattttaaaagaagaccgccccgtcggtttttttattttacatacctcaaaagaaaccattgccccgtattcgaataatgtgtctgccattttgctgagtgcgctgtccttacatgcgccgcatcagggaaaaggttatgccaaacaagcgatgctgcagctccccgcttttgtcgcaaattactttccttggtgtgatgaaatcgtgcttgctgtaaaccatcgcaatcatcgtgcaaagaacctgtaccggtcttccggttttattgataaaggtcgtcgcaggatcggccccatcggtgaacagcacattctgcatcattttttgtgaaagcgcttgattattcatctcatccctgccgatttttcttgaaacatctattcagaagcccatatacttcaagtattaacgacttgggagggtacaatcatgacagaccggcttaacattcacagattgaccacagaaaccagaaatccgcagaccgcttcaatccatcaagcagacacgatggaaattctccgcatcattaacgaagaggatttcaaagtggctgaagccgttcagcaggtgctgcccgatattcagattgccgttcaattcgcccaccaatcattacggcgaaacggcaggctgatttatgcgggagcgggcacaagcggcagactcggtgtactggatgcggttgaatgcccgcctacatacagcgtaagtcccgacaccgtcatcggtctgatggccggaggagcagacgcctttttgcaagcggctgaaggtatagaagacagcgaggaaaccggcgctctcgatctcaaaacgatcgggcttaccgcagaagacaccgtgatcgccatcgcggcaagcgggcgcacgccgtatgcggccggtgcgctgaaatacgcaaaaacaatcggcgccaaaactgtcgcgctcacatgcaataaacactcattgatcagcacttatgccgatcacagcattgaagtcgtcgtcggccccgaagtgattacagggtcaacacgaatgaaagcggcgacggcacataaaatgattctgaacatgatttccacggccgtgatgatcaaaagcggcaaagtgtacgaaaatttaatggtggacgttcatatcagcaacgaaaaattgaaagaacgcgcaatcggcattatccaaagcatcacgggcgttccgtacgacaaggcaaaagaaacgcttgaggccgcaggcagccatgtcaaaacggcaatcgtcatgctgaagacgaattcagacgaaacacacgcgaaggcactgctcaaagaagcagacggcttcattgacaaagccattgaacagcacgtttcaaaagaaaaagaacgctgatcgttctttggtgaaaaataatgtgcttttacgagcccgcgccgttttcatgatcggcgcaggcgcttttaggacgcgtttcaggcacagctccccgggaaaaatcgtacggacaaaggaggatctccatgagcaaagaggcattttatcagtcactggccaaagatatcctggacaattgcggcggttcatcgaatatttcaggctttacccactgtatgacacgcctgaggattacacctttagatcaggacaaaacggatattgaagcgctgaaacggcttgacggggtaataggcgtcgtcgaagccgaaacactgcagatcattctcggcacgggtgtcgtcaatcatgtcgccgacgctttcgcaaaacttatgtcatccggaaaaaacattgatttaaaagaagccgcctcacggaaaaaagccgatctcaacagaaaaaacaccacacccatcagactgtttctgagaaaaatatcaagcatcttcattccccttattcccgcactcattgcatcaggtttaatcaccggtattacgaaagccgtcattcaggccggctggctcccgaaagaatcccaaatcgcacttattttaacggttatcggttcaggcttattcgcttacctcggcgtccttgtcggcatcaatgcggcgaaggaattcggcgggacacccgcgatgggcggccttgcgggcatattgatccttaaccctgagatcgccaatatcagtttgttcggagagaatctgctccctggcaggggaggattaatcggcgttcttttcgctgcggtttttatcgcttataccgaacggtttatcagaaagtacgtccatcaatccatcgacattatcgtcacgcctacattgtctttacttatcaccgggctggtgacatatgtcgtttttatccctgcaggcggttttatttctgatctcattacatcaggtttattgtcgctgctgaatgtcgggggagtgctctcagggtttgtactgggagccgccttcctgccgcttgtcgtcaccggcctgcatcagggcttgactcccgtacatttggaattaatccgatcaatcggagatgacccgcttcttccgattctcgcgatgggaggcgcgggtcaagtaggggcggccttcgccatctttatgaaaacaaaaaaagcctcattgaaaagagcgatcggcggcggacttccatccggtctgctcggaatcggagagccgctcatcttcggcgtcacgctcccgctcggccggccgtttttgacggcgtgtttaggggcgggaatcggcggcgcctttcaagcccattttcaggtggctactttttcaatcggtgtctccggccttccgctctcgtttctcgtacagccggctcaaatcgttttgtatatcatcggtctcttcatctcttacgcggcgggctttgtcttcacttatgcgttcggatttaaggatgacatggctgctgaatttgaataaaccgggagggatcagaatatgaaaacactgacagccgccatactcacaatggtcatcagcctctcttttctgccgcagcacaaagccgaagcccaatccaaattatacgacgtagcaaagcttagaaaggttgatcaaatgattgaaaaagacatcgcagcaggattccccggagccgtcctcgtcgtcgtaaaggacggacgggtgatcaaaaagaaagcatacggctacagcaaaaaatatgacgggaacgtccttttatcgcgtccgaaaaaaatgaaaacatcaaccatgtttgatctagcttccaatacaaaaatgtacgcggcgaattttgcattacagcgactcgtcagccagggaaagcttgatgtgtatcaaaaagtctcggcttaccttcctgatttcaaagacagaaaaagcgatccgattcaagaaaaagaccgcattcgcgtcatcgatgtgctccagcatcaatccggtctgccggcaagcttttatttctatcagccggacaccgcaggccctttgtattcacaagaacgggataaaacgatccgttttctcactcaaatcccgcttgcatacaaaccgggaacaaaacacgtatacagcgatatcggttacatgcttctcggctgcatcattgaaaacataaccggaaaaacccttgatgcctatgcggaacaagaactgtacaaaccgctgaaactgacgcacacactgttcaatccgctgcaaaaaggctttaaagaaaaatcattcgcagctactgaacgtttaggcaacacacgtgacggagtcatccgtttccctcacatcaggacgtatacgctgcagggggaagttcacgatgaaaaagcattttactcaatgggaggggtgtccggtcacgccgggctgttttccagagctgatgacatggccgtccttcttcaagtcatgctgaacggaggcagttataaacacgtttctctcttcaataaaagaacggccgatttgttcaccacggcggcatcctctgatccgactttcgctctcggctggcggaaaaacggcagcccggatatggagtggatgttcggcccttatgcaagcaggcaggcatatggccatacgggatggaccggcaccgtcacgattattgatcccgcttataagctggggatcgcacttttgaccaataaaaagcattcccccgtcgtcagtcccggtgaaaacccgaatgtttttgaaggggatctttttccgaccggaagctacggcagcatcataaaaacgatttatgaagccattgaatgacaacccatgtcttttgtccaaactatgacggcaggagggcaccatcatgaaacttgttatctcagctgtattactgttgttcattgttttcggcacgcatcatgtatcgacaaaaccggacattccgtcacaggcggaacaagcggtatcccgtatgacattagatgaaaaattagggcagatgctcatgcctgattttcgcaattggcaaaaaaaggggcagtcatcacctgaggctcttacccaaatgaataaagaagtcgcagggcttattcaaaagtaccggttcggcggcgttattttattttcagaaaatgtaaaaaacactgaacaaacggtacgcctgacagatgcctttcaaaaggcgagccctgacattccgctattattaagcattgatcaggagggcggcatcgtaactagacttggtgagggcactcatttcccaggcaatatggcgctcggagccgctagaaaaacagcctacgcgtcccagaccggcgccattatcgggaaagaactgaaagcactgggcattaatacgaacttcgctcccgttctcgatatcaataataatcccggaaatcctgtcatcggcgtcaggtccttcagttcagaccgagatctgacagcttcactcggtcttgcctcaatgaaggctcagcaaaagcaggatgtcgctgccgccgtcaaacatttcccgggacacggcgacacggatgtcgacagccactacggccttccgcttgtcacccacaatcaagaaaggctgcgtcagattgaactttatccgttccggaaggccattcaggccggagctgatatgatcatgacagcccatgtgcaatttcccgcgtttgacgatacaacctataaaagcaagctggacggttcagacatcctcgtacccgccacgctctcgaaaaaagtgatgactcatcttctccgtgaggaaatgggctttaacggcgtcatcgtcacggatgcattaaatatgaaagccattgccgatcatttcggccaggaagaggcggtcgtcatggccgtaaaagcaggagtcgatattgccctgatgccggcccaagtgacatcgctgcaaacagaaaaccgctttgcccgggttcattccgcattaaaaaaggcggtacaaaaaggggatattccgctgcagcaaattaacaaatcggcggaacgcatcatttccctgaaaataaaacgagggatatatcccgcaccgaaagagacaaatctgaaaaagaagattgcaaaagcaaagaaaaccgtcggcagcaaaaatcacctgaaagctgaaaaacaaatcgcggaaaggtccgtcaccgtcttacaaaacaaaaaccgcacgctcccattcaaaccgaaaaagaacagccgcgttctcattgccgctccatatgaagatcaaacagcgtcaatggaacaaaccattcggcagctcatcaagaagaaaaaaatccggccggtaaccatcagtaaaatgaacttcgccgagcgcacatttcatgatgaacacaaaaagcagataactgacgctgattatgtgattacaggctcatatgttgtgaaaaatgatcctgtcgtaaacgacggcgtgattgacgattccgtcacagatcccggcaagtggacgactgcatttccgcgggcagtcatgaaagccgcacaatcgaaccaaaaaccctttgtgctgatgagcctgcgtaatccatatgacgccgcgaactttgaagaagctgaagcccttatcgcagtctacggctttaaaggatatacagacggacaatttctccagccaaacattccggcaggcgttgaagcgatattcggacagacaacaccgcaaggcaggctgcccgctgacattccttccgtcacgcatccgggaacgacactgtatccttatggtttcggtatcaatctgaagaccggaaaaccgctttaaacaggaggactgatcatgaaaacacaaacggctgcgcttcttgccggattagtcgtcatcagtgctatgacggcagtctcggcggcttctgacagaaaccttcataccgccaagaaaccaagcatccaaacaggcatcgaccgcctgctgaaagattataaacaggaactgaagggaaaaagggtcgggctgatcaccaacccgaccggtgtgaacaattcattgaaaagcagcgttgacgtgctgtatgaggcaccagacatccacttgacggcattattcggaccggagcacggtgtccgcggcgatgctcaggccggagacaaagtcacatcgtatatagacgaaaaaacagggcttcccgtctacagcctgtacggggaaacgaggaaaccgacgcctgacatgctgaaagatacagatgtgctgattttcgatattcaggatgtcggaacgcgatactacacctacatttatacaatggcctatgccatggaagcggccaaagaaaaaggcattcctttttatgtattggaccggccgaatccgcaaggcggacgaaatccggacggcccggttcttgaaccggattacgcttcatttgtcggactgtatccgatcccgctgaagcacggcatgacgatcggtgagcttgctcttttattcaataaagagtttcatattggcgccgacctaaccgtcgtaaaaatgaagcgctggaagcggacgatgacgattgaagataccggtctgccgttcgtcctcccttcgcctaatatcccgaccccggacagcatattcgcatattcggcgacaggactaatcgaaggcacaaacgtatccgaaggaaggggcacgacaaagccgtttgaactgatcggcgcgccttatatgaaaaacaccgagctcgaagaacgcctgaacagtctcaagcttccgggcgtcaccttcagagccgcatcatttatccccagcttctccaagcaccagggcaaactgtgccacggcgtacaagtctacgtaacaaacagaaatacatttgaagcggcaaaaacagggctttccattctgaaaaccatgcatgacttatatccgaatgacttttcattcttgccgacaggctcttttgacaagctgatcggtaacggctgggtacgcaaaaaaatagaaaaaggcgcttccattgaagacatcaccagcacatatcaacgccggctggaccaattcaaaactataagaaaacaatacctcatatactgacaacattcgtgttacacgtgtaacattttgacgcatttcacatttccgctttttataggaaaacattcatttatttggtacaatttaaatgataacagttatcatttaaatgaatgtttcctaaaaggtggtttctcatgaaaaacacattattctttcagcccattgatatcatctccgtaaaaaaaacagccgaccttctgtcagagcatcagctcactgattcccccgtattgatctttcatgtgaaaggcgagggacaaattgatatcggaacagacagctttccgctgcagaaggaaacgctctacatctgtccttgtgatgagacattcaatattgcccctataccgtcaggcggcatccatttgtatatcgtcagactccgtgttttctcctattcatcagatgatgaagcgatgcttccggataacggggaagacatcttccacggacttcagcaaatgaatttacaaacggttgatcatttgacaagccggcttcagtcactttctgaaaacgtgcgatcggcggatgcattgcagaaaatgaaatatacagccgactttcagcagctgatgtatgacctttatgctgcaaaagtatgccatcaaaataatacgaaagcggcgatcgaacagacaaaacaattcatacatgctcagtccgacacaaaaatcacgctcacccagctcgctcatatggcgggaatcagtcccaagcattacagtgaaacctttaaaaaactatacgggcagagcgtaactgaatatatcacagacatccgcataaccaatgcgaaaaaactgatggccaaggcaaactgcaaactgcgggaaatcgctcatcaaatcggctaccaagacgaattttatttcagccgcatctttaaaaaacataccggcagctcacctacaagctatatgaaaaaaaggcgcacaaaaatggccgcgtacggaaaagaaacgatggggcatctgattcctctgcatcacgtgccttatgctgcggcgctgcacccgaaatggacggcctattattacaaacaattctcttccgatattccggttcacctgagtgcttaccgttataatgcaaattgggaagagaacctgcacacactttcccaagctgccccggacatcattttcagtcttgattctgtcagtgaagaagaaaaacagcgcctgaatgacatcactgacgttttttaccttccggctcaagagaattggagagaccagtttcttcgcaccgccgcatatttgaatgaagagcaggaagcgcggcactggcttaaagcttatcaaagtctcgcccattcagcgaaagatgctcttaaacacgtgcggcatcagcggttcttatttgtccgtgtatataaagaaaatatgtacatcgcccataacaacagtattgaggatgtcttcttcggtgatttaggctttgcctccgcaaaaccggaatcttttgctcctgacgaaaagatttccttggacatgctggcggattgccaggctgactgcatcatgcttttcacttgtaaagaaccggaaacgcttcgttattttcagcggattcagcagaccgggatatggcagaaccttagagcagtcagcaataaacgcgtgtttcccatatcatctgacccgtggattgaatattctccaagcggacatcagcggatgatcgagcaaagcatttccattttatccgaagatcgtccatggtaataccggaaattatccatggtcttatccctgttcattctctataattccaattgataatagttatcaattgaacaggaggaacaatagatgaagaaattggcattcgctttcatgattttgcttttggctttcacggccgcggcttgcggaagctcagaaacatctgatacagcaagtaaaggaaaggacgcttcttcagataaaaagaaaatcgaatatctcggaaaaacatatgaagtcaaagcgccgactgacaaaatcgccattacaggcagcgtagaatcaatggaagacgccaaattgcttgacgttcatccggcaggggcaatttctttctccggcaaattcccggaactgtttaaagatattacagataaatccgtatctacgggagaaaaaatgcagccgaatatggaaaaaattcttgagctgcagccggacgtcattctggcatcaaccaaattcccggaaaaaacgttgaaaaaattgagcggcaccgctgaaacgatccctgtctctcatatctcatcaaactggaaagaaaacatgatgctgctcgcccagcttacagataaagagaaaaaagcgaaaaaaatcatcacagattacgaacaggacctgaaaaagacaaaaacaaagatcaacagcaaagcgaaacagtcaaacgcgctggtcatcagaatcagacaaggcaatatttatatttatcctgaacaagtatatttcaactccacgctttacggtgatttaggcctgaaggcgccggacgaagtcaaagcggcgaaagcgcaggaactgatttctcttgaaaaattaagcgaaatgaaccctgaccatatcttcgtacaattctctgatgacgaaaacgcagataagccggacgctttgaaagacttagagaaaaatccgatctggaagagcctgaaggcagtcaaaaaagaccatgtatacgtcaatacgattgatccattagcccaaggcggaaccgcgtggagtaaaatcagcttcttacaggttgcggctgacaaattgactcaagactaataaagagtaggtttttcacatgtatgcaaaacggcggacacacatgattatcattgcttcaccgattgccattgttctgtcactgctgctttccgttttatacggcgcaaagcagcttgacatccataccgtgttctccgcattgctgcactttaatccggagaataccgaccatcagatcatatggcattcaagaatcccgagggctgccggcgctatgtttatcggcgcagcccttgctgtttccggagcgctcatgcagggaatcacacggaactatctggcctcgccttcgatcatgggtgtgtcggacggctccgcttttatcatcaccctttgcatggtattgctccctcaatcgacatccattgaaatgatcatatactcgtttatcggttccgcattcggcgccgctcttgttttcgggctggcctccattcttcccggcggttttaccccggtgcagcttgccatcatcggaacggtgacaagtatgcttctcagcagtctgtcggctgcgctttcgatttattttcaaatttcgcaggatctcagtttttggtacagtgcgagactgcatcaaatgaatcctgattttttgaaactggccgtcccgttttttgcgatcggaatcatcacggccatgattctcagcaaaaaggtcactgccgtatcattaggagacgacatttcaaaaagtctgggacagcagaaaagaaccatcaaactcatggcgatggcggccgttgttatattgaccggaagctcggtggcactcgccggaaaaattgcctttgtcggtttggtcgttccgcacatcacacgttttctcgtcggatcggactacagcaggctgatcccatgcgcgtgcatcatcggcggcgtcttcctgactctttgcgaccttgccagccgattcatcaattatccctttgagacgcctattgaagttgtcacttctatcatcggtgttcctttctttctttatttgattaaaagaaaaggaggggatcagcgtggtgcgtaaaatggccggaatttatatcattctgattgctctcatattgctcgtaagctatttcagcatgacaagtggttctttttccgcaaagccgggtgaactgctcagtacgcttttccgcatccatccgaatccgcaatatgacattttgctgtttcagctgaggctgccgcgcattgtcatggctgctgccatcgggctcggattggggatagccggagccgttattcaggccattaccaaaaacggtcttgccgatcccggtattttgggcattaatgcaggagccggagccggaatcgtcacgtttatgcttctgtttcagggacaatctgaagcgacggcacttgcctctgcgatgggtatgcctgtcttcggcctcatcggaggattgatggcggccgtgctgatctatattttcgcctggcaccgggggcatctggaatcgggcagaattattctcgtcgggatcgccatgaattccggattcagcgcgctgtctttatttctttcattaaaaatggacccgcaggattatgagatggcgatggtttggaaaaacggcagcatctggtcggcaaactggatgaccattacggcgatccttccgtggctgatcgtgttcattcctctgcttatggcgaaaacgtcattgctggataccattcgtttcgatgaggacacggtgaaaagcctcggtgtttcaaccaataaagaaaaaacgattttactcattgcctgcatcgctttgatcagcgcatgtgtaaccgcagcgggcagcatggcatttgtcggactgatcgcgcctcatatttcccgcaggctcgccgggattgagcacagatactcattaccggtcagcggattggtcggtatgctcctcgtcatatccgccgactttgcgggcaaattgttctttcagccttcagaagtgccggcgggaattattcttgcgattctcggcgttccttatttcttttttcttctgtttaagcaaaagaaggggctggatgcatgagaggcacccttacagaacaccggataaacggaaaggaatgcactgtgtatcttcctccctcctattcggttcaaacaggggctttaccctgtgtgtacgtactggacgggggttctttgtttttagaacagatggataagcttgaatcccaatttgcgaacggaacacttcccgaattgattttcatcggcatcaaaccggctgacaggctcgatgagtacactccgtggcccgcgccttccctgagccctgcgtttcatgatttcggcggcaaagggaggctctttctcgaggagctgacaaatgtcatcattcccactgttgaagatatgcatcacatttctgcacatccggaaacgagaggactgatcggcgcgtcattaggcggactgttttcgatatacgcgatgctgcaaaagcctgaaatattcggcagaatcggttgtatttccggttccttctggtatgaaaaatcagcagattatgtccgctccgcatctttgcgtccggcacggcggcgtatctttatgtctgtcggcagccgcgaagctgagcataaaaacaacatccaaaacaccatgatccgactaaataaagacgtgtacgaaagcctcaagcaaaaaggcttttctcaatctcagctctctttcactgttgaagaaggcgccgtgcaccatcaagaagcattcaaacgacaattcaatgcagcactaagctggctgtacggaaaaaaccgctcacgtggctgagcggtttttttcatacttgatcacgaccggcttaagttcaaagcgtctcagcaaatagccgaacaaagcggcaaggatttgctgaaaaagcatcccgatgacgaccggaaccgccacttgagacggaaaaaaagaaacggcgagaacggctccggcgctgatattgcgcatgccccccgtataaatcagagacacaatttcatcctggctccgcttcatcagccttccgatcagccaagccacggcataacccgtcatggcaataaaaaataccatgcctgcgatgcccgcaaatttgatatccacgtgcgtgacatacggcgcgatttccgaactgttaatggcaatgacaatcatcagacagatttttgaaaaaggagacagcgaccggcttattgcctgagtccttaccggcggggaaaactggttgactatcatccctgcgatggatggaatcaccaccatctccgccagccctttcatcattccccacacatccatctgaacattcgccccggccaggacagacaggcttaacggtacgataaaaggagaaagcacggtatcaaccaggataatagacagcgtcaatccgacattccccttatacatcgcagcccaaatcaaactcgtaattccggtcggaatcaccacacccataatcagccccgtcacagttaaagggtcaccgctgaaaatcagatggccgcttccccatgcaaaaacaggcatgaaaatatgcagaacaaacaatgccatgatcatcggtagcggcttctcgatactgcgcttcagcgaatgaaaattggcactcagactgcccgtaaatgtaataaatgcaaatatccacggcacagcgccggccatccagctgatatgctgagataacagcacacccgccgccacacttgacggagtcaaaagcggcatgattctccccaacacttggttcaacttctgaagccacatcatatgcaagtctcctatatacggttttcaagtctcattcattataacaatgcaccccggcaaatttaaccgaaaaaaagcccggatatattcatccggacttcacaaattctatgccatttgtttcattaaatctcggcttttctgatttaatccctttaattcagcctcaattccgtattctttacatttggcgacaattttctcaagagccgccgctcccgaatcatcccacacgtgggcgtcggtcaaatcaatgacaatccgtttcacgtcttcatcataaacgatggcattcatgagctcagacacggaagcaaaaaagatctgtcccgttaccttataagttctgacatctttctgttcggaatgtgacacaatcttcagcttagaaattttcgccgtaaaaaagatcgcgcttagcagcacacccgcgaagacaccctttgataaatcatttgtcaggacgaccgtcatgacggtaataaccataacgatcgaatcagtaaggggcgctttccgcaaacctttaatcgatgaccagtcgaacgtgccgatggacaccataaccatcacggccaccagcgcagccatcggaattttcacgacgataccgcttaatacggcaattaaaaacattaaaaacgcgccggcggtaaaagccgataatcggccgcgtccgccggctttcgtattaatgacagactggccgatcatggcgcacccggccatgcctccgaaaaatccgttcacaatattggcgatgccttgtccgcggctttctttgttcttatcactatccgtatccgtcatttcatcaatgatctgggctgtcagcaatgactcgagcaatccgacgaaagcaagcgccagagaatacgggaaaataatccgcaatgtctcaaacgtccacggaacatccggtatcaagaaatgcggaagtgaacttgtaatcccgcccatatcaccgaccgtgcggacatccgcatggaagaccaccgcaatgatcgtcatgacaataatcgccaccagcggagacggcacagccgtcgtaaccttcggcaatagatatatgatagccagtgatccggcaagcatggcgtacatgacccatgaggctcctttgaactggggcagctgcgcagaaaaaatcaagatcgccaaagcattcacaaatccgatcatgaccgaacgcggaataaatttcatcaatttcgctatcttactgacaccaagaataaattgaataatacctgtcaaaatggttgccgcaaacaaatactgcagcccgtaatcagccaccaatgtcaccatgacaaccgccattgaacccgtagcggctgatatcattcccggtctgccgccgaagatagaaataataatcgcgatacaaaatgatgcataaaggccgaccatcggatcgacacctgcaataattgaaaatccgatcgcctcggggatcagagcgagggcaaccagaataccggccagaatgtctttacggacattcccgaaccattgctgctgtaacgtataatctttcaaatgataacgactccttttcactataaaaatccgcaccctatcagttggaaacattgattttcatctggggaatatgaggcaagcttacggggaaaaagaggacacgctcagagtataatgtcgttgaggaaaggaattgtgaacaaagagtatcatattaaactttaaagaaatgtgcaagaccctataaataagaaaagaaaacgactctcactggagccgtttccgcttttataaaagttccggatcagacacaagaatcgtttttattgcgctgatatcctttctttcttttgtcaccgggtcgatgcccatgagatgatcaatggcttcttcataattcttcagttccgtcttttccgtaataagatcatagagctgcggaaggtcggacgcgcatgctaacgcggcttccatgatctggcgggcttcacctgtgcctacaatcgtcacgccgtttgatagcagctggtacggcctgaccgtcatctcatacgtatcatcaaagcccatcggcacgattctgcctcccttttcaataaaaggataagcccaatcaagctgattgccgattgcgtcaaaaatcacatcaaattttcttccttgattaatccgtttcacttcatccacggttaatgcttcagggtggtagacataatccgatatccggctcgccgcctcgcttcggaaactgcctatttcagtcgcaaccgtcaatcgcgccagttttttcaccatcatttgcacaagcagtccgatcggtcccgaccccaaaaccaagaccgagtcctccggctgaatcgaagccttgtccacaacattcagcacacaggagagaggctcaaccaatgtggcccgctcccattccattgaatccggaattctgtacatgaacctgtcttcccccacgtaatattccgcaaacgttccgtgcgccccgattccgagctgccaatcctcgaaggtttcgcaataacacgtcagccctctccggcaataatgacatttcccgcaaaactgcgtaggatctatcacgacgcggtctccgacttttacatttgtcacgtccggtccgatttccacgaccgctcccaccgattcatgccccataatcatatgatgggttgcattcatttttcctttcagcacatttaagtccgttccgcagataccggtgccgaaaattttcactttcacatcattggatttccgaatttgaggctcgtccacctcttgatattcaagcttatcattaggagtccagaccaacgccttcatatttctcttcctttctgccccagcggatttggtctaacaatgtttgatgaagctccttcgttgatgccgcaatacatgattgctgattctgataacttaaatctgtcagaagcgtttcgtccaaagaccggccgtacgcatccgtaatgaccactcccgccttcttcgccaaaaagacgcttgcggcaatatcataaggaaacaaatgcagcacctgtccgttcccgacctgcttaaaatctgaaagcagcttcggatcatctttcagcagacgattgccgatatccacataagcatccatctgccccgtgataattcgtgaaatcgaataagaagcgctgttgaaaacaaaaaccccgccattattggccgactggtcaatcagatggccgtatgcgtccgtcatcagctgcgccggatgcccgttaaattcaaggctccaaaacatatttttaatatcccgcactccgctcaaattcggcaattctccatgatacccttcaaaatgaatggcatcgctgtatacatcaccgtacatataagcgcctgatttcaattcaagtaaaaaagcaaactcgatatccttaatctttgcgtttggcttatacgaagcaagcgcaatcgaaatacacgacatttcaagtcctgcggcggccgggcgcgttccgtctatcggatctacgattaaaatatattgcggatcttttccaatcagcttcaggccgccatcctccgtgtaaaaagcaaccggatggcccttttcttgaatataatccagcaccgcctcctcagcagcggcgtctatgttaaattgggcgtcgcctcccggagaatagccgtttacgagccggtttttcagcgtgcctttttgatttttcaccttttgataaacaaattgtccaagctcaatgatatagtctctcacttgatttcctccaatagcttgcgaagtctgtagcagagcacttcggcttcactaagtgttatggttaaaggcggacggattttaaatacatttccgaatccgtaacgggatgtccggagaatcagcccgtaatccattgcccgttttgcaatataattggtcagctccacatccggttcattgttctctttaacaatctccacaccgatcataagaccgacgcctcttacctcagaaataaaagcgaaatcctctttcatcgtttctaagcgatccataatataatgaccgaccgtcgttacattttccaaaaatcccggtcgctgcatgatatctatggttttacaagcggcagcggcggccatcacatttgagccgtatgtgaaggagtgcgtataccccggaagcccggtatacttgtcctccgtcagagtggcggcgacttgaaagcctgtgcccccgagcccttttgctaccgtcatcatattaggtttcacatcgaagtggtccgcggcaaacattttacccgtccgtccgaacccggtctgaatttcatcaaaaatcagagcgatatcatgttcatcacaaagctgtctcagctgtttaaaatactctttaggcggaacgacatttccaccgtttccggatatcggttcaataatcatggcggcaattttcccattgctcgcatactcaataaaatcattaattctttctacgcacagcataccgcatgaatcaggtttctgattataaaaacagcggctgcaatagggatcggggacttgcaggccaaaagaaatttgcggcgggaaaggttcttttctgaatgagttgccggacaaagcggaagtcatatacgtttgtccgaggtggcttcgaaataaggagatgacatcggtttttccggagtaatactgagccattttaatagctccttcatttgcaccggaaccgctgctgactttagggtgtacttttgtgagattatcgggggcgatttctactagtttttctgccagtttatttacggcgtctgtttgaaaagatgatgttacatggatgagcttatcggcttgttctttaaccgtatcaatgacctctttgttaccgtatcctaaattcaagttaaacgtggcagaagcgcaatcaatgtactcatttccctcttgatcgtacaggtaaatcccttctccgcgctccattactacatcgtcaacactgtaatacaagctgtctggattcgtgatttccttcgttcccacaaataccacccctatgaaattattagaatttcgctttttatcgtataaattattgaaaataatgtcaacgttctttcttgtaaaaaatgttaacaatttgttaacgttaccataatggatgtacgagaaaaagttatgtgatatagtaacaatacttggattttttgtaaaaacatcatgtcatacgagtagagagaaatatgattttaccaataaggagataaaatgatgaaaactcgtctgctgtggataagctgtttttcttatggatcgattgcttttacacttgttattctgggagccgtactgcctgagttactcacacattattcacaaagctacagtaatggcggtgtattagtattctctcagttcatgggctttctcatcggagttattggcatgccatacatggtgaaaaagcttgggcgcaaaaacgtcgttatctttggcctggcactcatcagctgtgaaatgttcatcaccttcctgccgccctggccgctgctctttcttctcgtcagcatcgcagggcttggcgccggattggtggaatcctgtgtaggcacgattatcctcaccgctattaaagaaagacaggctgtggccatgagcaagatggaagtggcctacggattaggtgcgctgttcatgcctctgctctcaggctttcttatcaacaaccacatgtggacaattgcttttttagtattagggttatccagttttgcactcttaatcgcatggaagcagatgagtttcggcagtattgatcagcttctcatccgcaaagaggtctcttccgatgacactaaaaaacaaagcaccggttatcggtcacacggattgctgtttattgccttggcgggtgcttacttcttcttttacggcggcagtgaagtttccattgtacattttatcccctccatcttcgctgagaaatgggatatccccaactctttggcaacgataacagttactgtgtattggacggggatgatcatcggaagattattaacaggcccggtatcagaaaagctgacatatcaccgttatctccgtctcataagcattggcggtctggctgcacttactgtattagcattaagcaaaaacgtatggttcggttttgccctttgcttctttttagggctgttcatggcaggcatgtttgcaatagccctaatcatcacgaatcatttttatcccggaaagacagaaacgactaccagtattctgctcgcttcaaacggattaggaggttcactccttccgatcgccgtcggctggagcttagatgaatatcccgtacaaactgcgttctggctgtttactgcactgatgctccttatgctgctgattgtgttcagtttaagaatgctcgagacaataaaatcaaacaatcttcaacatcacaacagcaaagcaaaatcaatgtaaacaaaaaagctaatgcctttcaaaggcattagctttatatatctatgtgatctttcatataaaaaaccaagttcatcatgaacttggttaagatagcttggcggcgtcctactctcacagggggaaacccccgactaccatcggcgctgaagagcttaacttccgtgttcggcatgggaacgggtgtgacctcttcgctatcgccaccaaaccattgagagtgttctctcaaaactagataacagtaagcatacattcaaattggttaagtcctcgatcgattagtatctgtcagctccatgtgtcgccacacttccacctcagacctatcaacctgatcatctttcagggatcttacttccttgcggaatgggaaatctcatcttgag

SEQ ID NO: 8 - DNA, 165217 bp, Bacillus methylotrophicus
tatcaaaaagctgttaaaacaaaaggcattaccatgagcatgtcccgcaaagggacgcccgctgataatgcctccatcgaatcgtttcattcctcgctaaagtctgaaacgttctatcttaacagcattgatcgaactacgactgccatcgtagaacgcactgtcatagaatacattcattattataacaatattcgtattcaaaccaaactaaacaaccaatcaccgataaactatcggcaattggctgtttaaaaggtgttttgacccctgtctcaaaaacggggggcagtccctaagggctccggttttctttatgtttacagtgccagccacatcactgcaatatgcacgatcagcagacagtaaacgatgaggaatagctggacgaccttttttctgaataacatgcagatcatcatgagcacgggaaaaatcaggacgccggccgttttattgattgatgtattcggacggttcgacacgtcatagtgaatggccatatcagcaggaagaaacggataaaacacaatcgacagaataaaggcgagaaccacagctccccacagcactttatcattcatcaaaaacatatgcacactcccttttttacatataatagtatattagtccgaaaaatctaatttatcaatattttacctgttgattggtgtataatcatgtcaatgaaatttccataagctaggagggtttcaattgactgacaagaagcaaaccagcatgttttcattctttctttttatcatggccgcctggatcatcgttttgttttttaccgtcatcgcggcactgccaagctccgccatccaattaaccaagcatcaatccaaaaccgtttccatgatttatccgcaaagctggggatttttcagtaaagatccgagagaagacagcttgaacatctatcttcttgatgccgatgaggagctcagatggccgaataattctctgaaaaatgtcatcggcttaaaccgctacggccggacgcaagggatagagctcggccttatgctggaaaagctgccttccaaagagaagtggaacgacttcacgactggccaagacattaaggataccacatttttgaaaatgaaaaatgagtctccctccccaaggctgaaagggaaaatgatcattacatatgaacgcattaccccatgggcatggagccagcataccgaaacgaaaagaaccatccaaaaatacatcggagtggatgtcaattgattcaggatgcaaaaaagcagctcaccttatggatgatgaagaatccgccttggacaaatgtgtacgggcttgccagaagcttaatcgcgctcggcacgctgctgacattgctgtttaatccggcgtctgtcttcttcaaaacgcaaaatcaaatgctcagtttttccgacacgttcagcctgtttctgctgtttcccgatttccgttacattgagatcgtcaaagccgtttgtatctgtatgttaatccttgtcgtcattggctggcggccgcgaatcaccggtttttttcactggtggatttcgtacagcttccaaaactccgccgttacccttgacggaggagatcaggtggctgccgtttttacactgctgctgctcccgctgacattaaccgatccgcggaaatggcactggtctccgtacgaggcgtcttttgagaaaagaccgcttgagccttattaccgctccttatgctgggcgacactgacaatcatcagaatacaggtcgcgatgctgtactttaactctgtcattgccaaactgatggaagaagagtggcagaacggaaccgccgtttattactatttgaatgatccgatgctgggtctgccggatgcgcttcacggtctgtttgactttatcctgcagtccaagcttgtcgtcatcccgacttggggcacgctcattgtgcaaaccattatgttctgcgctttgttcgctccgaaaacatattggcgtctgatattgtttatctccatttttatgcacgaaatctttgccgttatgctggggcttacctcgttttccattacggtggctggtattttggtcctgtttttggtgccggcagagaaaacagtagctttgaaccattacaatcccctttttatcagatacaattttttaaataaaaggaaaaggaggaaattatttggttaaaagcaagaagtccgcagctgccatgatgctggtgtttgttttaatggtcgcattagtcggcccgcatgccgcggcgaaaactgagccgtcggtctcttattcgggtgaagacattttttccggcatctttttcggacaaggtgaggtcgcaaaactccttcctgaagtatgggataccaaggctgtcaaaaagattgatcaggatgaattaaagcaagtttccgatcaggtgatcgctgatattaaaaagtcatcgccggattattttaaagagttgaaagcggcggtctacagcggcgattatgagaaagtgaacagcgtcattgatcaaggttcgcagattatggcgaaagtgctgaaagaagagtttgacaaaaagagcatggacaaaggaaaatcaacggccatcggccaatgcgcaacggctgtatgggtatttttaaacgcggcggccgccattgagacgatcgctcttgcggtagcggccatcattttgacagtagcaagcgttgacgaagattccgacttaggaaaagagcagctcatcgctaatgtcgttgaccgcattaacgcgcagcactgaggctgaagaaagaaaacgctaaggagacgaaccttagcgtttttttgattgaagcatctgttttaaatatgcttctgaatcaaagccgagttcctcgtcggcttcttttttcagttcaagctgaagtcgcacgtacgtgtcatatttcgggctgagcttttgaagaagattgctgaaaggcgatccctccttcagcgcgggcagatcagaagctgattctccgaccttgatcaggctttccctgtattcttcatctgtctgcactcttttcacaagctgaatgatgatgtttttatgagtgtcccaagtggcggggtctctctctaaaatccgctcgataaattgatcatgctggactttgtgctgctgaagctgagccggatcctccttgccgaccagctgcatcatcgggtgtgcagccggaacttcttccatatcatccaatactttaataagctccgcccatatcgtttttttctcatctgtatcaatagaaaagtcgaggaacggttcaaacagcgcggcgataaattctccgaaatctcccgggaacagttttttcagctgaagtcccatatacttcggttcatctattttgacctcgccgatatcatgcagaattgaatcgacattttccgcatcttccacgcgcttgatcagcatttcagtcagtttccgttcctgctcaagctcttcaatctgccggctgagcttttgatgctgccggcgcagtatatcatgcagactgctgccctctaagaggaacgctttaatatcgcttacagacagtgccagcattcggagggctgcaatcattttcagcgtattcacgttctgagcggaatactcacggtatccgttatcagggtttttgctgacggtgattaaaccttcctgctcataatatttgatggcttttttcgtgagacccgtctgcctggcggcttcttttatattcattctgaatcactccctgtttttcattctaaacgtgtctctaagggtcaggtcaagagagggcgggaaataagacgggtttattttatattttagaaatttcagaaaatatgattgacaacgcacctttgttgcgattaatataacgttatataatgttatataacgttatataataaaacactgaggagtgaaggatttgagtcaaactgccgcacaagtgaatcacaaagttcaggctttcttggatgatctgaaaggaaaaacgattgaccacgtctttttcgtcgcttgcgggggttcttcagccattatgtatccgagcaagtacgtgtttgacagagaggcgaaagccatcagctctgatctctacagttcaaatgaatttattcagcgcaatcccgttcagctcggagagaactctctcgtgattttatgttctcagtcaggcaatacgccggaaacggtgaaagccgccggtttcgccagaaaaaaaggcgcgcttacgattgcgatgacctttgagcctgattcgccgctagcgaaagaagccgaatatgtcgcggtgtatgactggggtgagaatgcacaggcgataaatacgaattacggggttctgtatcaaatcgtgttcggcgctttacacgtgctggaaaaccatcccgcgtttgagtcggcgatcgacggactcaataagctccagaccgtatatgacaaagcgcttaaacaagaagcggatcacgcaaaggcattcgcgaaagcccacgaaaaagaagatatcatttacacgatggcaagcggtgcgaactacggcgtcgcttactcctacagcatctgcattctcatggaaatgcaatggattcattcccacgccattcatgccggagaatattttcacggaccgttcgaaatcattgatgaatccgttccatttattatcctgctcggcttagacgaaacaagaccccttgaagagcgggcgctttccttctcaaaaagatacggcaaaaaactgactgtgcttgatgcggcagcatatgatttttccggaattgacgattctgtaaaaggctatctggctcctctcgtattaaaccgggtgctcagaagctatgcggatgcgctggcggaagcaaggaaccatccgttaagccagcggcgttacatgtggaaagtcgaatattaagaacgcgcattatatttcaccggactataatgatatataacgttatagtccggtgacaaaggaggaaaagcatctgaaaaagctcatctgcctgttcgttctgttagccgtatgtctgtcagccgccgcctgttcaagccaaagcagttcctctgacggaaaagtgactctgaagttttttcacaggtggccgaaggagccggaaaaaagctattttgaagaagcggtcaaagaatttgaagccgctcatccggatattcatatccaaacggaagcggtcttaaacgattcttataaagacaaggtgaaagtcatgctcggaacaacgagcccccctgatattttcttttcatggagcgaccggtttgcttataaattcatcaaaggagataaagccctcgacctgtcgtcttactatcagcaggataaagattggtcctcacagcttgtgcagtcacaaatcaaaccctttacgcatgacggaaaaccgtacggtgttccgtggcaaatggacgctaaatcattcttttataataaggacatttttaattcattacatttgaagcccccggcgacatgggatgaactgatcacagtctctgagaaattgaaagagaacggatatattccgatcagtttcggcacaaaagcgccttggaccatttctcattatatcgggacgctgaaccagcgtatggtggatgaaaaaacgcgggcgaaggattacagcccggaaaccggagagtttacggacgaaggctatgtcaaagcgcttgaaaagcttcaggaacttctgccgtactttacaaagcacgtgaactccgttgatcacgaatacgtgcgccagcagtttacgagcggcaaagcggcgatgatttatgcggaaacggcagaaattaagctcgtcgaaccggtcaatctgggcttgtttcctttcccgaaaatcagcggcgaaaagggatctccccgtgcactgaccggatctccggaaggatttatgatttcctcaaaaacgaagcacccgaaagaagccatggaatttcttcagtttttaacctcgaaaaaaatgggagagaagctgataaaagacgtcggtaaatacagcgcggttcagggaacggcgacagaaaacaattccaccccgatccagcgtgaagccgtgcaggatatcgtccgcgccgaaacaatggtgccgtggtttgatatggatgttgacgttgaaatcgccgatgtgtatgcggcaggcgttcagcagatgctcggcggcacaatgacaccgcgcgaggtgatgaattccgtgcagaaagcggcgcgtcaagtcaaagcgtcatctgaatagaacagatttctttggagaaaggagatgaggatttccttggtcagccgaaaacgtttcattccgtatctgtttctcgcgcccgcgctgatttttctgctgttcgtttacattccgattattgagaatgtgtttttcagtctgtttgaatggagctcatttcaacccgaaaagacgtttatcggtttgaaaaattatattgacctgtttcacgatcccgtattttttacagcgctccgcaacaatgtgctgtatgcggtcatatcgctgatttgccaggttggcggcggcttaattctggcggccgtgctggaagacagattggtaagaaaatggtcgccgtttttccgcacggtcttttttcttccggtcgtcatttccatgaccgtcattgcgctgttgtttgattttatttataacccggaaatcgggcttttgaatcagctgctggaagccgtcggacttgatgaactgacccgggcgtggctgggcgatgaaaacaccgctatgctgtctgtcatttttgtgtctcaatggcagtctgtcggttacatcgccatgctgtacattgtctcgattcagagcattcctgctgaattatatgaatcggcgcagctggacggagccggaaaaatccagcagttttttcacattacggtgccgcagacgaaagaaatgtcgtttgttgccgtggtgatgacgctgaccggcgcatttaccgtatttaatgaaccgtatattctgaccggcggagggccgggcaatgcttcagaagtgctgagcacatttttgtataagagcgcttttacaaaagatatgatgggctacgcttctgcgatcgcgacggtggtgcttttgctgacgcttgctctgtcgcttattcagatgaaattctttaagaccggaaaggaggagtagccgatgcttcctgaaaagccggacttgcgtcatgcccgtcaggccgtcagaacaggcggaaaaccgagaaaatggtatgttggggaaacgtctgtgtggctgtttctctttatctacctcattgccgttgcttatccgctgttatggatggcggtcagcgcctttaaaagctcggatgagatttttgagcacagctggtcgctgccctctgtctggcatcccgaaaacttcgtatccgcatggaaccaagggatttccgcttattttatgaacagcgtcattgtgaccgtgctgacttgtctcatcaccgtatttgtgagcgcctgggcggcatacgggcttgcccgttttcaatttaaaggaaaagggtttgtgctgatcatttgtcttggcggcttgatgctgacgccgcaggtcagtcttgtgccgctgtactccattatccagtcattgggactgtacaatacgtattgggcattgattcttccgtacgccgcctaccgtattccgtttaccgtgattctgatccgttcctattttttgtcgatttccaaagagcttgaggaagctgcctatctggatggatgtacaagtttcggaatttttttcagaatattcttacctatgagcgtgccgattctggtgacatcaggcattttgacggcttaccatacatggaatgagtttatgtttgcgattatttttatcgatgatgaaaatttacggacgattccggccgggctgatgcagttcagagatgcgctgcagacggattggggcgtgctgctggccgggctgacgatttctgctgctccgatcatcgcgctgtttttattgatgcagagatattttatccgcggcattgctgcgggaagcgtgaaaggataaggaggatgaaaagatgaaactgatagcggccggagataatgtagtagattattatcaggatcaggagacgttttacccgggcggaaatgcgttaaacgtagccgtgcttgcccggcgcttaggccacgaaacttcttatatcgggattctcggcagtgatgaagcggcggatcacgtattgaatgtgctgaaactggaaaaggtgaatgccgatctgatccgccgggcatacggagaaaacgggatggcggtcgtcacgcttgatgaaagaggggacaggatatttgccggatcaaataaaggcggcgtgcaatcgcgtctgacactcgcttttcaggagaatgacatctcatttatcgccggacatgatctgctgcatacgagcgtatacagcaggatagaacgtgaccttccgatgctgagcggccatgtgctgatttcctttgacttctctgtaaaacgtgacgaagcctatttagaagcggtctgtccgtacgtgacgtatgcgtttttttccgggagtgatttgagtgaaagtgaatgtatgcggcttgccgaaaaagcccgcggtttcggagcgaaaatcgtctgtctgacaaggggagaacatggcgcggtgttatcggatggggaacgcgtctatcatcagccggtggtaagagctgatataatagatacattgggcgcgggtgattcttttatcgccgggtttcttaccgatttcttcgagcatcaggatattcggcgagcgcttactgcggccgccgggacggctgccaaaacatgcggagggttcggagcgttcggttacgggcatccctacaggccgggcggcgggaaaagcagtgaaaaaacgagaatacgataagcattgtctcgttttttatacttgttacgcatagggactgttaatggtaaacgtgacgcggtcggtatgcattacaaacagcgagctgtatatcggcttgtcttttgacataaaagcggttttgtcaatttcaaaaagcgcatccccgatatcacaagccagatagcggctttcttcctgcttggcgtatacgacatttaacagcttcgtattatgggtgggcaccacctgatagtgctgtttcaaaatgtcatgcatcgacacgccgcctttaatatgcttgccgatgtcgggaaataaactgagcggatagtgggcgatttcgaatgagagcggctggtcgtcgtgaaataaaatgcgttttaattcaagaacgggactttcggaagcgacgcgaagtttttgggcgatggatttaggcgcttcgatgatttcatgggaaaggatctggtgtttcggttttttccccgttgattccataaattcagagtagccgttgaccgcgatgagctcccgcttcagtttagggcttttaacgaacgttccttttccctgctgccggacgagccagccttcttccacaagatcaaggatggccttcctgaccgttatgcggctgacgttgtacgtttcgcacagctcattttcagtcggcagttttacggacggcgaataaacgcccttcttgatatcgtccgcgataatttgtttcagctgaatatataaaggtttcgagctcccgttatttaacaatgggacggacctcctttgtcaagtagtagtactattatatgtattatgacgttataatacaaatttgcttttcatttatgaatctatcagaaaccccgaacatttttaacataacagaaagatgtggcggtttccagtattggaggaggtttcgaatggcatcattaacatttgaccatatcaaaaaaacatacggcgcccaatcggcggcagtgaaggattttcacttagatgtaaaagatgaggagctgctggtgctagtcggtccctccggctgcggcaaatctacgacactcagaatgattgccggactagagagcatttctgaagggaagctttatatcgatggagacacggtgaacgatctgctcccgaaggatcgcgatatcgcgatggtttttcagaattacgcgctgtatccccacatgacggtgtttgataatatggcgttcggcttgaagctcagaaagctgccgaaaaaagaaatcgcagagcgagtccggacggccgctgatattttggaaatcgggcatctgctcaagcggaaaccgaaggctctttcaggcggacagcggcagcgggttgcgctcggccggtcgatcgtgcgggagccgaaagtgtttctgatggacgagccgctttccaacttagatgcgaaattgcgagtgacgatgcgcgccgaaatcagcaagctccatcagcgtttgaaagcgaccatcgtttatgtgacgcatgatcagacggaagcgatgacaatgggcgaccggattgtcgtgatgaatgaaggagatattcagcaggccgcaagcccccatgagatttatcattatccggcgaatctgtttgtggcgggttttatcggttctccgagtatgaattttataaaaggcgtcgttgaagaaagtcacgggcaatggtattttgccggttcgtccgttcgtctgcccattccgaaagaaaaagcggccgttcttgtgcagaaaggatacagcggtaaggagatgattgcggggctgcgtccggagcatttgacgcttgccggacaatcagagcacccgcctgaagcggtgtgccgcgctgtggcggaagtatgtgaaaacttaggcgcggagatgtacgttcatgcggtgagcggagatgaccgcatgacgatccgtcttgacggcgcttcacaggtgaaacccggcgatgccattctgcttgcggtcaatatgaaccgggccgtcttttttgatgccgacactgaaaacgccgtatattgaaaaagggagcctgatgatcggggctcccttatcacttcttatgatacgattaccagatttcatccgcccattccggatggtcgataaacggattgcggttatgctgatagtcttcgtaaatgatttcgttccgccgtttttccttactgtcgacggggtcttgttgattccatttgagcaaaacggacagttttcccatgtaaggagctgagccgtttccggttttatcattcagctcaaggtcgggatacccgtcgtctccttcataacgcaccgccatgtaaaacagcatgcgggcgacatctcctttaacctcatcgcgcggctcccaggaatcaccgtcgtaataattgcccggcgctttcgggtattctgagccgccgttatcaaaatccatgtttcctctggcactgttcacctggacgtctgcagggcgcagatgatgaatgtccgtcccggggccggcagctgttccgaagtttccgtgtgactttgcccacacgtgttcccggttccagtccccgacgctgccgccgtttttacttttggcccgtgattcctgggtgtagagcaagatgacattgttcgggtttgccggatcttcgtcagtttccttcaatgcattccatacttggctgtaagacagctttgtatgtccgctgatgatgcggtgcagggcgctctttaaggccgttccgctttttccggaagcttctttgtaatatgtgtccgtatccgcagacggagtgatgacagctgaggcagtttgcggaaaaagagttgtgccgccggcagttgaaaccgccatccggctgtacagattcgtgtcagccggcgcgcccgcagaggctgacggcgcggcccatccaaaaatgaaaaacaggcagacaatcggcagaaaccaaagtttttttgtcatgacttgccctcctttacctctattatccaaaaaataaatctaatattctatcttttttgaaaaatggttccttcggcttattggtcaaagtatccggaaaatcattgattttttggaagatatgataatgaactcgttatgcgctccttctataatgaagatcatcttgtcagtttttcagtttaaaaggagggcgtgtatggaacaccagcagctttcggcggcgaatatcgggatttccgatgacatacaatggctgtctcaattcggcgcttccgcttccggcggagtgacgaggcttttatatacgaaagaatggatggacgcccagcttgccgtcaaaaagaaaatggaggcgttcgggctggaaacggcatttgacgatgtcggaaacgtgttcggccggctgaacggcacagaatcgcctggtgaggtgattctgaccgggtcgcatattgacaccgttattgacggcggcaaatatgacggtgcgttcggcgtgctggcgggcatgctggcgatccggcatttgcatgagacgtgcgggcgtccgaaaaaaacgctggaggctgtgtcgctctgtgaagaggaagggagccgttttcccatcacctattggggctcaggcaatatcaccggtgctttctcgctttcagatgcggaaacgccgaaagacgcgtccggcatttctctgaaagaagccatgcggcagaacggcttcggtgcaggccgttatccagcaccgctgcgcacagatatcaaagcctttctggaaattcatattgaacaggggcaaacgcttgaacgatcaggaaaggatatcgggattgtcaccgggattgccggacagagacgctataccgttacgcttgacggtgaatgcaaccatgccggcaccacttcaatgaaatggcggaaagacccgctcgcggcgggaagcagcatcatccacgaactgatgctttcagcggaaagacagccggaagagctccgtctgacgtgcgggaaaatgacggttgaaccgaatatggcgaatgtcattccgggccgtatccagttttccgttgatattcgccaccggcaggaagacgtgctggcagccttccatcagaaactggcgtcgattgttgaaaacatcagccgcaacaaaggagtcaggcccattattgatgaatatatgaggatagagccggttcaaatgaatcagacactgacgcgtaccacagcggaggctgcaaaagaactgggggcggacccggagaaaatcgtaagcggagcgggacatgacgcccagatgctcggcagaacctttccggcctgcatgctgtttgtaccgagccgtggcgggatcagccactcgccgcttgaattcacacccgtacatcagcttgaaaccggcgtccttacgctggcgaatgtattacataaacttgcctattaacgtaaagggggaatcggcgtgccgaccagaaaagaattgtgcattccgcaaagaacgattatgacaccgggaccgacagaagctgaaccgagagtgctgagggcgatgggcgctccgatcatcggccagtttgacccggcatttaccggcatcatgaacgaaacgatgcaaatgctccgtgaattgtttcaaacggaaaaccgctgggcctatccgattgacggtacatcaagagcggggattgaggctgttctcgcaagtgtgatagagccgggcgacagcgtgctcgttccgatatacggacgcttcggatacctgctgactgaaatcgccgagcggtacggagcggacgttcatacgatcgagtgtgaatggggaacggtcttccggcctgaagagattatcagcgagatgaaaaagatttccccgaaaatcgtcgctatggtgcacggagaaacatcaacggggcggattcacccgctgaaagaaatcggggaagcgtgccgcgcccaagacgcactctttatcgtggatgccgtggccacgatcggaggctgcgccgtaaaaacggatgaatggaagattgacgcagtcatcgggggaacacaaaaatgcctgtcggtcccctcgggaatggctccgattacttataatgaccggacggcagctgtcattgccgcgcgtaaaaaggtagaacgaggcattgcgacggcagccgacggcaaaaggctgtccggtcatcggccggttacgagcaactattttgatctgagccagctcgaagattattggagtgaaagaaggctgaatcaccatacagaagcgacaacaatgctttatgcgctgcgggagggtgtgcgccttgtcctggaagaaggacttgaagaacggttcagcaggcatcggcgtcatgaaaaagcgcttacggcgggacttgcagcgatgggccttgatttattcggcgatccgggggcgaagctgcctgtcgtcacatgtgtgaagattccgccggaagcagacggcgaatcaatcagaaggatgcttttgtctcaattcggaattgaaatcgccagctcattcggtccgctgcaggggaaaatttggagaatcggaacgatgggctacagctgcagaaaggaaaatgtgctgtttgtcctggccggacttgaagcggttctgatcagacacggagttgccgttaaagccggggaagcgctgcaggcggcccttaacatatatgatctgccggctgaaaccggtgtgctgtcatgagacttgaaaacgagattgaaatcatctggacttttttcccttttgcccgttatactgagtggtataaaaaatgacaaatatggaatgatcatctgtttgtctggggagaaggtaagaaatcatggcgtacataggccgattgtcaattttaatgctgaatatgtttattgcgatgcttggaatcggattgattattccgattatgcccgcatatattaccgaattcggagcgacgggcagcacgatgggtctgcttgttgcggcggcggggcttacacagcttttatttgcgcctattgccggggaaataaccgacaaatacggacggcggaaactgattattttcggcatcgccgcctttgccgtgtcacaattgatcttcgcctttgccggaagcctctggcaattgttcgcatcccgccttttgggcggaatgggcgcggcgtttttaatgccgtcaatgttcgcttacattgcggatattacgaccgaagaagaacgcgggaaaggaatggggctgttcagcgcggcgatgacgcttggtgtcgtcatcgggcccggtgtcggaggctatttggttcattatggcatgtctgtgccgttcatcgtgtctgcaagtcttgcctgcttttcaagtgtgctttcatttttctttctgcccgaaacgctgggacgtgaaaagcagctggaagcccgggcaaaaacggaaaaacgtgagcatctgtttaagcaaatgtcacgcgcgctcaaatcgccgttcgcgtttatgctgattctggtttttgtgctgaacttcggaattatgaactttgaatccgttttcggtctttacgttgaccataaacacggatttaaagcctctgatattgcttttattattacggccgcgggtctcatcggggtgtttgtgcaggcggtcggcgtcagttatctcgtccgcaagttcggggaaaaacgcgtcattaacgtgacgttgatcggggctgctgcaggacttgtgtggtgccggtttgcgggttcatattgggccgtttttgccgcggcaatctttttcctgacgctgacatcgctgctccggccggcggttaatacgatgctgtcgaagctcgccggtgaccagcaggggtttgccggaggaatgaacacctcattcatcagcttagcgaatatcgccggaccgtcagccgccggttttctctttgatgtaaatatggaatttccgtatatgctgggagcggccattctcgccatcagttttctggccgcgcttggctggggcaaaaagacacagacccggccgttcacgcagcaaggataagaatcaaaagcctccgggtatccggaggctttttgctgattgccgtttattctttagctgtctgcatctctgaaattgcagagatgcgcatagagggaaaatcatatcgaacgccattgtgaattataggaaaatgagttgttccgtatgctcaagcatggcgcgaatggaaaccggaacaggtgtagataaaggaaaaccagttttatcgcttgacgagtctgacgaatttgatctgccagaagttgatcaaaaaagaaggcagtcaggcggggacaacattgagcggcgtaaatggagaaaaggaaaaagcagtgttttggaacttgctgtttcgtatgcaggggggagagcattctgataaaacgggtcattgaaataatacgaactgttcagaaggggtctattggtgacattaaggagtggtggtcttataaaacctttctcggatgactttgtgatggttcccctgcacgaattttgcagattaaaacccgcaattaggccaacacacaattatgcaagagacaatcatctaaaaagggtgtcggtaagtacaataaggtgtactgaaaaggagttgaaaatattgtattattacccgtcattccatttgtatcagcggcaagaatttaattcttatccatgggcccatcaattgacccattcagggagctccacctatgtttccgcgcgccctcctttttataattctccatgttacagagagtgcataagaagcggagcggatagttatttctgctgctatatctgcggtttttgttaaaaagaaagacttatagaagtaagtgatctttccaagatgacagtgagaccattatccagacagccattagcaaacacacaaagcttcaatacgattcacggaggggaaccacccctcctttttcggaaatttaataaaatcctcttgatcggcctgccagaagcggtatttggtcttgatgtgttcgactgttggtattgacgaagaattcaagatatcaggaagcagcgaaacctgtgtgtatcagcgagacacaaagctttccgccgctgagcgggttagttctcactgcgttctatctcctgtagtagataacgagattttggggctgtctgctgaagaaaaagaagagattcgaaacgccgcaatcgtttaattaaaaagaagagatagattctatctcttcggattattactgaactacaaaatggtatcgggttttccaagtgaaggagtcatcatagaattcaatccaggcttctcctttagcgactgcaaatacctgaatagttttgtagtcagtacctaaagctctccatgtaacagcaggagggttataacccataggattaaaggtaatgcgattaccagaagtagaataattccttatctctcctacttttaaattgacgcgggtttcagactgaggttgaaacaaattcttattcactttagtagtgggcccggcagctgatgctgaagagttaaaaaaaggcgcgaaaacgaataaaacaattgcaagtgataacaaagcatttttagctagtttcaaagtgaaacctccttttggcatttataggataacaataacacttaatggaaatataacaatggagaaattgttaaatattctttgaaatgagtgaacacatgccaagagaactgataaatgcaaaaatcacacatgtttcttacgtagacaaggctgctaatcaaaagcagttttttttatgaaatcagaaaaagaaaagcagcatgactttcagggcggcgttggtgaagtggttgagtcttatgtcgctccccgctgatttttaaatgaatggcgaaaccatcaaaaaaggatcatgggtgcttgtgacaaaggtaccgaggcaatttgggaggaaattaaaaagagtgagattatcggttgtatcctgaatatcgaaaaagcctgatgatatcaacggaagcagatgttgatggcagcattttttgagaatttagctgaatgaattccccttaaataggatgcgggagaacacccgcatccctgtctctaacgattccttaaccgatcagccgctgcattctcagcgcgagccgcaggcgcatcgtcgtctccggatcttttaagcttttgccgagcagttcctcgcatttttctaaacgatagatcaccgtatttcgatggacgtacaggcgcttagccgtttctgaaatttggcagtgggtctccagataaacagacagcgtatgaagcaggctctggtcctccttttgccggtctgccaggctttggagggtggcttcgtaaaacttcttcacatcttccgccggaagcaggcggagcagctccggcacgtctttggcatgatagatttgaataaactccgcgcttctggacaaatgcccggatgaaatggcgtctgaagcttcagtaaaagcgtcagggacgtcgatcagcttttggcatatgtttgagatgccgaaggagacagtccgtttaaactgcgtccggacctgcttttgaaactgctccaaaaagctgatgacagacgcgtgcatttcattccagctgtctgtcgcttcaattaaaagaataccgacatttcctttaataaagagatgagggggaaacggaaaggatgacagctccccttcaagcagatcaaatacatgatcggaaacgagctgattttcggtaaagctgatcgttttctcatttcggtcaagctttccgcaaatgcacatgtatttctgatcccagcggagccggaattctttggcgcggcttttgatttcttcatggccggtaaatgagcggtcgatgaaattgctgaaaaattcattgcgcgcccgtctgccgaattgtttgacggcattttctttcagcagttcaaaggaaatgacgttagccgcctgttcaattgtcaaaatcatgcctttatcagcggtctgcaccagctccggtatcaccagataaccgcagtttttctcaacattcagaatcggcaggacagaatacgcctttctgtcggacagcatggaaaagcaggtgaaataaggcccggaaagggaataacagatgtttttcaataaagacgtgtcaatgggtatgcggtgggacgatgataagagttttgtatgctgatccaaaagaagcacgggaagccggagaatgtctgagagcttcttaagcagggattgcagccctttgccgctcatgatgtggtttgtgaattttttatgggcgtaaatggcctgctggagctcatttgaacgcatatcaagaatatggctcagtgtggcgttgacgatatctccgagcctgatgtcttccggcagctcaataatcggaaattcataccggtcggcaagctccgcggcatctttcggaatgacattaaggtaacgcttcgttttgatccccagtcccgcgcagccccgttttgccatgaggcggatcaaatctttcaacagctgagggcggtccttcaagtggtaagccgtggtgacgagcaattcgtttttatgtaaaaaatcagcgatgtccggcgcatccatcatgttgacgtgctgcacctccctccagccgccggatttgcctgcgattaatgcggcccgctcataagcgggaatcttcatcacgtcataaatgttcatcagtcagtctcctttcaggttctaaagacaaccattggttaatatgaataaaaatcatcaaaaattatagcggttttactgatgtattacgatcatagtagcagtaaactggcaatcatagacgcatgttgtgataaaaactgacagaaaaatcgtcatccttacagggaggaagataaaatggcctatgacgtaattgtaaagggtgcgaaagctgtacgaaaaggcggaacagagcgggctgatatcgccgtcaaggacgggaaaatcgccttgatcggacccggcattgacgaaaacgcggaacaagtggtgcaggcggacggcatgtatgtgtttccgggcgcggtcgattgtcacgtccatttcaatgaacccggccgagaagaatgggaaggcattgaaaccggctcaaacatgctggctgccggcggctgtacggcttattttgatatgccgcttaactgcatcccttcgacggtaactgctgaaaacctgctggcaaaggcggaaatcgccgaacggaagtcagcggttgattttgcgctttggggcggtttgatgcccggatataccgaacatatccggccgatggcagaagcgggggcaatcgggtttaaagcgtttctgtctaaatcgggaacggatgaatttcaatcagccgatgaacggactcttttaaagggaatgaaggaaatcgcggcgtgcggcaagattttggccctgcacgcagaaagcgacgccctcacccgattccttgaaaccgagtacgcgctccaagggaaaattgatgcccgcgcttacgcttcctcccgtccggaagaagccgaatgcgaggctgtgcagcgggcgattgaatatgcaagagcgacgggatgcgcgcttcattttgtacatatcagcacgaaacgggccgtgctctccattcagcaggcgaaaaaagacggattggatgtcaccgttgaaacgtgtccgcactacttattattcagctttgaagacttcctcaaaaaaggggcggccgccaaatgcgctccgccgctccgctcagaggctgataaagaggaattgatcggagttttggctgagggcctgattgatatggtgtcttcggatcattctccctgtcatccgtctttgaaacgcgaggataatatgtttctgtcgtggggcgggatcagcggaggccaatttacgcttctcggcatgattcaattagcgatcgatcatgggattccgtttgaacatgtggcccgatggacggccgaagcacctgccaagcgcttcggtttaacgaataaaggacggcttgaagagggatttgacgctgattttgccatcgtccggccggaaccttttaccgtcacaaaagaaacgatgttttccaaacataagcaaagcctgtatgaaggccgcacctttccataccgaattgctgcgacctacagcaagggacgctgtgtgtaccaggatggcggccgtaagcagagcggggctttcggaacattcctgaagccttctcaaataaaggagccgattctctgatgagaatcggttttttttgtcgtttggaaagcgggtctcgtggtatctttttataaaaaggagtaaaacacattgtatgatcaaatcttgaacatattaacggcatcctggtcgcgcaagactagtacaaaatggacggaagattgcccggccaaaggccagtgcggcgtgacggctttagtcatccaagatgtttacggcggtgacattctcaaaacaaaaaccggcacaagctggcatttttataaccggatagacggggagatatatgatttcacgagcggtcagttttcagagccgatcgtctatcagcacattctttcatccagggatgaggcattttcggacaccaatgaacatcaataccggttcctgaaaagtgcattcagaaaaaacatggaaacggaaagagaaaaacacctgtgataaactagagtgagaggtgaaggattgtgatttatatcggactgacggggtggggggatcatgacagcatctatctgcctaaaacagcgggcccgcaaaaactgcaggcgtattcctcccattttcccatcgttgagctggacgcgagcttttacgcgatacagcccgcccgcaataatgaaagatgggtcaaagagacgccggaatcttttcaatttgtcattaaggcatatcaaggaatgacgggccatcagcgaggcgatattccctttgaatcgaaggaagaaatgtttgaggcgtttaagctgtcattatcgccttatatagagcatggaaagcttgccatggtgctgttccaattcccgccgtggtttgactgcaagaaagaaaacgtcgcatatttaagatggtgcaggcagcagatgggcgatattccgtgcgcgcttgaattccgcaaccggtcttggttttccccgccattttatgaacagacgctttcctttatgaaggaggaaggctggattcacagcatatgtgacgagccgcaaatcggcgagggcagcattccgaccgtcctgaaagcaacggatgaagaaaaaacgcttgtccgttttcacggacggaacaaacagggctggatcaaaccagacggcggacaaaactggcgtgaggtcagatatttataccgctataacaaacaggagctcaaagattggaaaaacaatcttcaggagctgaaaaaacagtcgcgcaatctgtatgtgctcttcaataataactcaggcggagacgccgccgataacgggcttgagatgcttgaaatgttaaatatctcatataccggacttgctccgaagcagctcgacctattcagctagaaaagaggtttcaagacacatgtcttatcttattttgattatattgggatttatcgcgggaacggtcggcagcctgatcgggcttgggggaggaattatcatcgtgccggcaatgctctatttaagcacgatgactccgtttttccatgacgtaacaccgcagactgccatcggcacgtcccttttggtgattatttttacgggcctgtcatcaactctggcctatatgaaatataaaaccgttgactacaaaagcggactgatcttttttatcggttccggcccgggaagcatcatcggcgcgtatttgtctaaactttttaatgcgcatacgttttccgtctggttcggactttttatgattttgatttccattacattaatgctgaaggcgaaagcaaaaccggtcaataaagcgcataaaggcatgatccggacatatgaggatgaatcgggtgagctttatacatattcgtaccgtatttttaccggtatcgtgattgcctttttcgtcggtttattgggcggtcttttcggcattggcggcggctctcttatggttccggccatgatgctgttatttttgttcccgccgaaagtggctgtggcgacgtcaatgctcattattttcttatcctccgtgacgggttccgtgtcacatatcgcagagggccatgtcaattggctgtatgcgctgtgcctcgttccgggcgcgtggttcggcggcaaaatgggcgcgtgggttaataagcgggtgcagacgaaaacgatcgtgcttttcatgcgggtcgtcttgattttgatcggctgtgaattgatttatcaagggatattcagctaaaaggtaggagagatggtatgttagagaagctccgtttatatcatacgaatgatttgcacagccatttcgaaaattggccgaaaatcgtacattatattgagcagaagagaaatgaacatgaaaaagacggggaggaaacactcgtattcgacatcggcgatcatatggaccgattccaaatgataacggaagcgaccttcggcaaagcgaatgtcgacttgttaaaccggcttgagatcgatgcggctgccgtcgggaataatgaaggaattacgctgcctcacgatgagctggcggatttatatacccatgccgcgtttcccgtcattgtgtccaacctgtttgacgcggatggacagcggccggaatgggccgagccctacgtgatcaaaacactgaaaaacgggatgaccgccggcatactcggcgtcacggtgccgtattatcccgtctatcaaaaactcggctggacggtgacggatgcggaaaaaagcattcaagaatcacttgacgatatcaagggcaaagcggacatcatcattctgctttctcatttaggcctgatcgatgaccgggccgcagcggaaaaatttccggacatcgatgtcattcttgaatcacatacgcaccaccttcttgaggacggacaggacataaacggcgtattgcttgcatgtgcggagaaatacgggaactatgtcggctgtgtcgagctgacgatagaaagtgaatcacgaaccattgtcagcaaacaggcgtctgtacagaaaatggctgattggcaaggggaatctgaagatacggcggcttttctgaaagagaaggaacgggaagcggaaaacctgctctccgaacaagtcgccaacctgaatgaagaagccggtgtgaagtggtttgaggaatcgccgctcccgcttctattagccgaagcgctgaaaagctggtgcggctgtgaagtcagcatggtgaattcaggcgttattttggggcctttacagaaggggcctgtcacaaagcttgatctgcaccgtatctgccctcatccgatcaatccggtggccgttcgtctttcaggcagagaacttcaggaaacaatcagccaggctgcctcggaacaaatggagcagctgcggataaaaggcctcggcttccgcggggaagtgatgggcaggatggtatatgccggagcggaggcagaggccggcatccttgaagacggtgtgacgcatctcctcaatgtgaaagtgaacggagaagagattgatccggagcggatatactcggttgccgttctcgatatgtttacactcggaaagctgttcccttacatccgcgattcaaaagaaaagcaatactttatgccggagtttttaagggatctgctcgcctggaagctcgcgcggcagccgtaatgtcatgtagctgcccgccgttccatttcacccgaatgagtgaaagcgggactttttaagagtgaaaataaaatactatgtcccctcttacaagcatacattgtgatatgtaaggggggatttttcttgcctagataccggagcgctcttcgcaagagagggcctttgccttttcgatatgtgcttcttctgtcgtttgctttttttatcatatcgacggtcatcagcctttggatgatcaactcctcaatcaaaccggtgctgatgaacataggagaaatggaaaccaaacgggtggcgacagaggtcattacggaatccattgaagaatacatgtctcacagcgacaatgtgaaagatatggtcgatatgaaaacggatgaaaacggaaaagtcacaacgatggattttaatacacaaatggtcaacagcatgaaggcgaaagtgacaaagcagcttcaggctcatctgaaggaagcggagtcgaacaataagcagcatgaaacggaaaaaggcgcgaaaacggccgatgaaattatgatcgatattcccttagggcaggtcacgggaaacagcattctcggaaatctggggccgaaaatccccgtgcgctttaacctgatcggtgatgcgttaactgatgtgaaaacaaaaataaagccgtacggcattaacaatgccctgatcgatatcagtatttttgtggaaataaaagtgaaggtcattattccgtttgccagtaagacatcagtcgtgacaaataatattccggtctccattaaagcgattcaaggagaggtgccgcagttttataacggaagcggcgggtcaggtgtgacgccttccgtccagctgccgagtgaaaaacagaagaaagataaataaaaacacacagccgcaatctttcctggcggctgtgtgtttactttttcctgcggatttcttttcgttcccatgcccttaaatggggatacggatcaaaagaccattccgatctgccgttatctttatacatcccgtagtgaagatgcggcgggaattttcccgcggtgcccggcggtccgtacccggaactgccgacggagccgatcacctctccgggtttgacgatctggcctttatgcacaccttttgcaaagccgttcaggtgagcgaagtagtgatacgtgttattgatatccctgatgccgattctccagccgccgaaacggttccagcccttcatttcaacaataccgtagcaggtcgatctgacggggagcccgtaatgagcgaacagatccgttccttcgtgaatccggcgcccgccgaaaccccgtgcggcgccccatgtgctgcggtagctgtaatccgtcttcacgggaagcggaaaagcgtgctctccgagatcaaggcggccgaacgttttaaacagtgtcatgaattcggtgataatgccgaccgtctgatcacggcggtaataattccagagaccgatgcggatatggtcaagatcggttccgaatcccgctaaatactgagcaaatgtataaaggatatcctcatcattgcttacctcggcttttccgtcgccgtcgccgtccaggccgatcccgtcaaatactttaatgctgagaggcgcatcgtccttaggatttggattttcagggccgctccacaaatgatccggaatataaatgctgatgattcccgatttttccggcagatcctttcggttcgagcggacattttcttcatattgatcaactgccgcaagcacataccaaggaatctgcgtgactgcttcggctttgcggtacaactgcatccgttcgccgtaaacaagagccgattgttctttcccgcttgcagccggacagaaaactgaaaaaaggagaagagcagataacagaactttcacaacatgatctcctttcaggattgaatacaaatagtttgcggcaacaatccgagaaaatgtaagtaattctcttcccttgtcgagaaatttttcctatgttaaagtgactattgaatagaaatccgcaagttttatatccatcgtgaaatagaaatttttcgcacacgaacatgaataaagggataatggagatgatggggaaatggcaaagaaagacgagcatctgagaaagccggaatggctcaaaataaagctgaacacgaatgaaaactatacgggtctgaaaaaattaatgcgtgaaaataatctgcataccgtatgtgaagaagcaaaatgcccgaacatccatgaatgctgggctgtcagacgtacggcgacgttcatgattctcggttccgtctgtacgagagcatgccgcttctgcgctgtaaaaacgggtctgccgaccgagctggatctgcaggaaccggaacgcgtagctgattccgtcgcgctgatgaatttaaaacacgccgtcatcacggccgtagcgcgtgatgatcagaaagacggcggagcaggcgtctttgcggaaacggtccgggcgatccgcagaaaaagcccgttcacgacaattgaagtgctgccatccgatatgggcggaaattacgacaacctgaaaacattaatggatacccgtcctgatattctgaaccacaacattgaaaccgtccgccgcctgacaccgagagtccgggcccgcgcaacatatgaccgttctttggaattcttgcgccgtgcgaaagaaatgcagcctgacatcccgacgaaatcaagcattatgatcggtctcggcgaaacgaaggaagaaattattgaagtgatggacgacctgcttgcgaacaatgtcgacatcatggcgatcggccaatacctgcagccgtcgaaaaaacatttaaaagtccaaaaatattatcatccggacgaatttgccgaactgaaagaaatcgcgatgcaaaaaggcttcagccactgtgaagcaggcccgcttgtccgttcttcctaccatgcggatgaacaagtgaacgaagcgtctaaaaaacgccaggcccaagcataagataagccgaaaaaacccaaaacgccgcaggttttgggttttttgtgatggagccgtttttgcagggaaaaagtcattcttgaataaggatcgtctgaaccgctacactggatataaagaggaaaaattctccgtccgtccgaaccgtctcattttgcaattgatggacagaagtcaatgaattatgatagtaaagagtgataaaagaggtgaagacatgattcttattcaaaatgccgagtttgaactcgtacacgattttaaaaacggctttaatgaagaagcgttcaaagcccgctattcggacatattaaataaatatgattacattgtgggagactggggatacagtcagctgcggctcaaaggcttctttgatgaccagaatcaaaaagcaacctttgaaacgaaaatcagcacattggacgaatacatttacgaatactgcaatttcggctgcgcgtattttgttttaaaacgaatcagaaaataattgatgcagaaggggatgctgtcacgtgtattttgttgacagaaataatatcgaacaaacactccgtttttttgagacccagctggcgctgtttgacagcacgcctgcatgggagagcgagatcgaaaaaagggcgcttgagcggatcagccatcttatgatcgaatgcattctcgatgtcggaaatgatatgattgacggctttatcatgcgcgatccggggagttatgacgacatcatggatattctgacggatgaaaaggtggtagctgaggatgaaggaaataagctgaagcagctgatctcttccagaaagcagcttgtccaggaatatcagcacgccgaccatcaggagctgtttacgctgatcacgtcaaacaaagatgtgctgaaagcctttccggcccgtgtaagaacctacctggaaacagaattagggcctgtttccgcatttaaataacaacgagtgagaaaatccacaggagtgttgagtatgaaggattataaaggatatttgatagatttggacggcacaatgtacaacgggacggaaaaaatcgaagaagcgtgtgaattcgtgagaacgcttaaagcgcgcggcattccgtatttattcgtgacgaacaattcttcccggacgccgaagcaggtggcggacaagctgatgagctttgacattccggcatctgaagagcaggtcttcacgacgagcatggcgactgcgcagcatatcgcccaggagaaaaaagacgcgtcggtgtatgtgatcggcgaagaaggcatccgtcaggccattgaagaaaacgggctgagcttcggagaagaaaacgcggactttgtcgttgtgggaatcgaccgcggcattacatatgaaaagttggcaacgggatgccttgcgatcagaaacggcgcccggttcatttcaacaaacggcgacgttgccattccgactgaaagagggcttttaccagggaacggttcgctcacatccgttttgacggtgtcaacgggcgttgagcctgtctttatcggcaagcctgaatccattattatggaacaggcgatgcgtgtgctcggaacggatatttccgaaacactcatggtcggcgataactatgcaacggatattatggccggcatcaatgcgggcatggatacgctgctggttcataccggagtgacaaagcgtgagcatatggcagattacgaccaaaagccgacatatgcgattgactctttaaccgaatggattgaacatctataaaaaaagggacggccatgacggccgtccttattctgtatttctggcgctgtgagcaagccggcttgaagccgctgctgcgattgcgccgacgatatcatcaagaaacgtatggcattcgcccgtagatttatcatttaaccgcccgagaataccgggtttttctttgtcaatgtagccgtaattcgtaaagccgatcgagccgtatatattcacgatagagaaggcgagcacctcgtcaaccccatacaggctttcatcaatcgccagaatggtctgaagcggttcagacagctttttttgttcggcgagcacatctaattctattcccgttaaaatggcgttttgcacctcgcgttttgcgatgacacggtccacattgagcctgcatacctccatcgtcaaatcaggatgatattttttttgaaggaaatacaccagctcggcaatatcgtccgtctcaaccccccgttcttttaaacgcgccctggcgacagcttccacctgattcagttgttccttttctgacatttgcttcacccaatctttttttactagtttatacaacactcttccgatgtgtacgatgtttctccacttgattcaaaggattacaatatgtattcataattccgccggcgtatgactacgatgtgaatagctctaatttttcaggcaggtgattatgatgaaaagcatcattaaagaaaaatacggcatccacgtcagacagctttccgtttatcagaaataccaatgcttccagacgcctaattccttctttcttataattcccgtttccgggttttcgcaatcagagctgacggagctttactacatgagtcagtatttacaagaacaaagtgacccatacgtttcagtgtttatctttacgaaggaaggagaactgacctttgaggacgaaggcaaaacgtatgcgctcttaaaagcgccgattcccgtctcaaaccggtcgttttccgtcggaggggagcttgccgaatttcacagaaaagggcggggttttccgtacgaagtgaaagaagcgggcaggatcggccaatggaaggacttatggggaaaacgggtggatcagctggaatcattctggatgcagaaaattcatatgtctccgcttgaaccgttcgaaaagaaaatgatcgaagcatttccttattattcaggcttagcggaaaacgccattcaatatttagtggatacggagctggatgacaatcccggcgcagaagactcggggacaatctgccatcagcggatggaacgggatacctggtcggaggaatcattgatccgcattccgggcgattgggtattcgaccatgccgcccgtgatattgcggaatatatgcgcagcacatatttgtatcatcgtgacgacctgctcaaagatgggtttttgtttctgcaggaatatgagcaagttacgccgttatcctccttttccaaacgcctgttttacagccgcctgctgtttccgctccatttcttcgagacggtggagagctattacatttctcatgattctgaaaaacagttttacgaagagcagcttgactacattcttgccgactgcacccgctatgaacagtttttacagacatgtcacaacatgatgaatgtcaggtcggcgcaggtttttgtcccgcctgtggcgtggctcggaaaaggaatcagttcgtaagaaaatatgacgtaaaaatatttagaaaatagggaatcttgtcatatcagtgtgttaagcgttttcatagccgcagaaacaatattcagccgcttgtcaaaacaaatgcgggcttatataatatttgtaacttaaatgtctgtgaagggttaacaattgtccttttctagtggacaaaaggaagaaaggtggagtttctctttggaagcgattcgtattggactgttaggactgggaaccgtgggaagcggagtcgtcaaaattatacaagatcatcaggataagcttatgcaccaggtcggctgtccggtgacgatcaaaaaagtgctagttaaagatattgataaaaaacgagacgcagacctgccgaaagaagtgctgacgacagaagtctatgatgtgatcgatgaccctgaggtcgacgtgattattgaagtcatcggcggtgtcgaacagacgaagcaatatcttcttgatgccttgaaagcgaaaaaacatgttgtgaccgcaaataaagatctgatcgccgtatacgggtcagagcttttagccgccgcaaaggaaaatggctgtgacttgtattatgaagcgagtgtcgccggcggaatcccgattttacgcacgctcgaagaaggcctttcctctgaccggatcacaaaaatgatgggaatcgtcaacggaacgacgaacttcatcttaacgaaaatgattaaagaaaaaagcccgtatgaagaagtgctgaaggaagcgcaggatctcggattcgcggaagcggacccgaccgccgatgtagaaggcctcgatgccgcacgcaagatggcgattttagcccgtctcggcttctctatgaacgtcgatctggacgatgtcaaagtaaaaggaatttcccggattacggatgaagacatcagcttcagcaaacggctcggctatacgatgaagctgatcggcatcgcccagcgtgatgacaataaaatcgaagtcagcgttcagccgacactgctcccggatcatcatccgctctctgcggtgcataacgagtttaatgccgtttacgtgtacggagaagccgtcggcgaaacgatgttttacggccccggagccggaagcatgccgactgcgacatcagtcgtttccgatctggtcgcggtcatgaaaaatatgcgtctcggcgtaaacggaaacagctttgtcgctccgcagtttgaaagaaatctgaagcagccgtctgatatctacgcccagcagtttttaagaattcatgtcaaagaccaggtcggctctttttcaaaaatcacatcggccttctcagagcgcggcgtcagctttgaaaaaattctgcagctgccgatcaaaggccatgacgacctcgcggaaatcgtcatcgtcacgcatcatacatcggaagaagatttcagtgacattctgcaaaacttaaatgacctcgaagtcgtacaagaagtaaaaagcacatatcgtgtagaagggaacggttggagctaatgtggaaaggactcatccatcaatataaagaatttctgccggtgacggatcagacgccggccctgacattgcatgaaggcaacacgccgctgattcacctgccgaaactttccgaaaagctcggaattgaactgcatgtgaaaacagagggcgttaatccgacgggatcctttaaagaccgcggcatggtcatggcggtcgccaaagcgaaagaagaaggcaatgataccatcatgtgcgcctctacagggaacacatccgcggcagctgcggcatacgcggcgagagccggcatgaaatgcatcgtcatcatcccggacggaaaaatcgccttcggaaaacttgcgcaggccgtcatgtacggtgcggaaatcatcgcgattgacggaaactttgacgacgcgctggccatcgtccggtcaatttgcgaaaaatcaccgattgcattagtgaattcagtaaacccttaccggattgaagggcaaaaaacagcggcctttgaagtatgcgaacagctcggcgaagcgccggacattctggcgatcccggtaggaaacgccgggaatatcacggcctactggaaagggttcaaagaataccatgagaaaaacggcaccggacttccgaagatgcgcggttttgaggcggaaggttctgcggctatcgttcgcggcgaagtcattaaaaatccagagaccgttgcgacggcaatccgaatcgggaatcctgccagctgggacaaagcggtgctcgctgcggaagaatcagccggaaaaattgatgaagtcacagatgaagacattcttcacgcttatcagctgattgcccgtgaagaaggcgtgtttgctgaaccgggctcctgtgcatccatcgccggcgttttgaaacaggtgaaatccggtgaaattccaaaaggcagcaaggttgtcgcagttttgaccggaaacggcctgaaagatccgaacacggctgtagacgtatctgacataaaaccgattacgctgccgacagatgaggacagtattctggaatacttaaatggagcggcgcgtgtatgaatgaggcggagatgctgttttccattacggttccgggaagcaccgccaacttagggcctgggtttgattccgtcgggatggcgctcagcagatatttgaagctttcggttttccgaaacgatgaatggcagttctcggcggaaaccgaaactgtcgcgggcatccctcaaggaacggacaacctcatctaccaagtcgccaaacggacggctgaccgctatcagaaagagctgccgcccgcccatgtcaaagtgtggagtgacatcccccttgcacggggtctcggaagcagcgcggccgctatcgtcgccgccattgagcttgcggatgagttatgcggcctgcagctgtcggaaagcgacaagctgcacttagccagtcttgaagagggacaccctgataatgccgctgcttctcttgcaggagggcttgtgatcggccttcacgaagaagatgaaacacatatcgtgcgtgttgccgaagcggatatcgacgttgtggcagtgattccgttttacgaagttctgaccagggacgcaagagacgtgctcccgaaagagctgccgtaccgacgcgccgttaaagcaagcgccgtcagcaaccttctcgttgctgcgatcatgtcaaatgactgggcgctcgccgggaaaatgatgagaaaagacatcctccatcagccgtaccgcgccatgcttgttcctgagctttcaaaggtggaacatgcggccgaaatgaaaggcgcctacgggacggcgctgagcggagcgggaccgacgattcttgtcctgattgaaaaaggaaagggagaagagctgagaaagcagctttctgagcatttcccccactgtgagattgcggcgcttaccgtcccgtcagaaggaagcgtaattgaacggaatcctttagagcaggtgaaaagtgtataatgataaaaaagcgttcttcccatcagagaaggacgctttctttttctggagaaggatttttatttagggaagcgaaataaaaaagaaaaggaggagaaacgatttgaaaaaactcataaccgaggaggacattgcgactctcgtatccgtgacagacccgcaatatgcccctgacggcagaagagccgcttacgtccggacaacagtcaatcataagcgtgattcctattcctcagccattatggtatatgacacagaatccggcatctcaaacccatggactttcggggacaacagaaatacaagtccgcggtggtcacctgacggacagcgcctcgcctttgtttctgacagggagaacggcgtccctcagctgtacatcatcgacgctgccggcggagaggcaaagcaggcggccgatattccttggggcgtatcagatccgatatgggcgcccgacggcagatccgtgcttgtgtccgtcagactgacatcagcggagcgcgccgatgagaaagaaaaaaagaagcatgacgagtatgagccggttgatattcagtcattaacatataaacgtgacgggaaaggcctgctgaacggaagctgggcccagcttgtgctgattcatcttgaaacgggggagattcggcagctgacggatcatgaagcggatcattatggcgcggccttttcaccggacggcaggcagcttgcgtttaccgccaatttatgcgagccgggtgacgccggaaagccgagcgatgtctatctgatgaatctggcggacggaagcctgaagcagattacgccgcaccgcggttctttcggtttctgcgtgttttcaccagacggttcttatatcgcgatgctgggccatgaaaatgaatttcgcaatgcgactttagagaaagcgtggctgtacgacgtgaaaactgagcggctctcctgcctgaccgacatgctggatgttcatttgagcgatgcgctgattgcggattcaatcataggaggagtgacgccccggccggtatggacaaacgacgggcagggtttttacgttctcgggagcgagcagggaagcaccggtatttattatatctcgattgacggcctcgtatatccgatccgattagaagaagagtatgtgaacggttttgcttttcatcctgatcagaaaagctgtatcgctgtcattgccaaacccgcacagccttccgagctttacagcatttcgctcgaagatggggaagagaagcaattgacatccgacaatgatcggtttattgaggagcgcatcatatccgtgccggaaaagctgcaatatgaaacaaaggacgggctgacggtaaacggttggtttttaaagcccgccgtttttgaagaggatcaaacttatccgctcattctatacatacacggcgggcctcacatgatgtacggccatacgtattttcacgaattccaagtgctggccgcacaaggatatgctgtcgtgtatgtcaacccgagaggaagccacggctacgggcaggattttgtcaatcgtgtcaggggtgattacggaggcggagattaccgtgatgtcatgcaggcggtggatgaagccgttcaggcgtatccttttattgacagcggccgtctcggtgtgacgggcggaagctacggagggtttatgacaaattggattgtcgggcagaccggccgttttaaagcagccgtcacgcagcgctccatttcaaattggttcagcttccacggtgtcagcgatatcggtttcttttttactgactggcagctcggacatgatttgtttgaggaagcggataagctttgggatcgttctcctgtaaaatatgcgtcccgcgtttcgacgccgcttttgatcctgcatggtgagcgagatgaccgctgtccgatagagcaggcggagcagctctttaccgcattgaagaaactgaacaaaacgacgtcgttcatccggtttccgaaagccacgcatgagctgtcgagaagcggccatccggaacagcggatgaaacgcatccgttatatttgttcatggtttgatgactatttgtaaaaaataaaaaaccaggctgtcatgcagcctggttttatgattaaaatacttgttctacttcaacgacacccggtacttcttcaagaagggcgcgttcgattccggctttcagcgtaatcgttgaacttgggcagctgccgcatgcgccaaggaggcgaagctttacaatgccttcgtctacgtcaacaagctcacagtcaccgccgtcacgaagcagaaacgggcgtaatttatccaatacttcctgtacttgctctttcatttcaacctcagtcatgagattcgctcctttcatatacataaaaccattatattcacagtaacggtaaaaatctaatgtttggtttgcaaagctgctttccccattatagcatatttaaacttgaacataaaaaccgttttttatacaaaagctgccccgtcctttgtatactggtgtaaaggggatgatatacatgattaagccggttacgctcagtgtttacggcgctgaaacgctttgcgcaagctgcgtgaatatgccgagcgccaaagatacgtttgaatggctggaggcggcgctgcaacggaaatatccggaacagccttttcacatgcggtatattgatattgacgcaccgcctcagcaaaaggagacagaagaacttgcggagcgcatcagaaacgatgaatttttctatccgctcgtgctggtggaggatgtcattgtgggggaagggaatccgcatttaaaagatatatatgaagaaatggaaaagcgcggctatgttgcgggctcttaaaaatggccgctgatcgcaatcagcggcttttttcttatcagccgttgtgatgcttgtacatccataaaaggcctgattttaataaacggggcacacgcccgatgagcggacggtcgttgacaagaccgaagcccgctttttttccgagtgaaccgagaacgcctttcagcttaaattgcggcattgtttccggcagctcttcattgttccagcgtttcaggaggatctgcacaatttgttccgcctgtgcttcagccagctgggcgctcggcgcatgcggcaggctcgcgcaatcaccgacgacgtaaacatgctcatctcccggaaggttgtgatgcggtgttaaaacgatgcggccttgcggatctttttcagcgtccagttctctgacggctttattcggctgaattcccgccgtccacacgatggcatcggccgctattccttcatcatgattataaacgatcccgtcttccacttttgtaatattcgcattattgataatggtgacgccgtgttcttcaaaccatttctgaacatacttgctgagtcttttcggaaagcttgataaaatcaggtcgccccggtcaaataacataatcttcagatcgtcacggctctctcttaattcactggcaagctccacgccgcttaatcccgctccgacgatagcgacagatgcattggcgccgaggttgttcagcttttgataggcttcgcgtgactgatcaatggtctgaatgctgtaagtatgttccggcgcgccgggcacgttatgatacttatcctcgcagcccagtccgatcaccgcgtcatcgtaagaaatcggttcgcggtcatgaaacagaacctgtttgtttttcgtgtcgacggaagccacctcaccgtattgaacatccagattcggatgctcaggaaaagacaccctgatatgatgatcagaaatcgtgccggcggcgagcgcataatattctgtttttaagcagtgatacgggtttctgtcaatcagcgtgatggatatatctgacggaagctggttcggcagtaagcggtgcagcacccgcatgtttccgtaccccccgccgatcaagaccaattttttcataatgattccccttttgcccgaaaaatatggtagtcaatgttgttacaaaataacgaactatgtaaaataacatctagaattatatcgaatttgatctaaaaccacaataatagttttaaaataacctacaaattgaccagaaaacacgtaatagtaaaacctttaacctgaattaatatgttacgataacattgaacgtgaaaccggatctttgacgaatagaggaaattccgttaggataaggtacatatgtgaggtgaaaccgcatgaatccgatgattgaattctgtgtcagcaatttagcgcgcggttcccaggaagcacttgagatcttagagaaggatccgaacttggacgtgcttgaatacggctgtttaagctattgcggcaaatgcatggagtccctgttcgccctggttaacggcgaagtggtcacgggaggcacgcctgctgaactggttgacaacatatatacattcatagaagaaaatccgatgttttaatcagaggctccgaacggggtctcttttttattgcgccccgggttttggcaaaataaaaaatttgtagacagcaaaaataaatattgttatcttaataaagactttttttaaataaaattttagaggtggattcattgaatatcgtttgggggctgctcggggcagttgctatattagccattgcttttttgttatcagagaagaaaagcaaaattaacctgcgaaccgtcattgtcggtttatgtttacaaatggccttcggattcatcgtattaaagtgggacgccggacgggccgtatttttatggttctcaagccgtgtgcagcttctcattgattatgcgaacgaaggcatcagctttatttttggcccgctgataaaagtgggcagcagcccggctttcgcgctgagcgttctgccggtcattatctttttctcagcgctgattgccgttttgtatcacttgaaaatcatgcagctcatctttcgcgtcatcggcggcggactgtcaaaacttcttgggacaagcagaacggaatcgcttgcggcggctgcgaatatttttgtcggacagtctgaatcaccgcttgccattaaaccgctgattgcgggattgacccgttccgagctgtttacgattatgacgagcggcctttcggctgtagcgggttcgacgcttttcggttacgccctgttaggcattccgatcgaatacttgctggcggccagctttatggcggctccggccggtctcgtgttcggaaaaattttaatacctgaaacggaaaaaacgcagacgataaaaggcgattttaatatggacgaagaaggcgaaggcgccgctaatgtgattgatgcagcggcaaaaggcgcgtccacgggccttcagattgctctaaatgtcggcgccatgctgcttgcgtttgtcgcgctcatcgccgtagtgaacggaattctcggcggaatcggcggctggttcggtttcaaacatattacattagaatccattctcggttacgtgttttcaccgatcgcatttgtaatcggcgttccttggcatgaagcactcggagcgggaagctatatcggacagaaacttgtgctgaatgagtttgtcgcttattcaaacttcggtccgcatattgcggacttttctaaaaaaacgtctacgattatcagctttgcgctgtgcggatttgccaacttctcttcgattgcgattatgctcggcacactgggcggtttggccccaagccgccgttcggacattgcgcgcctcggattaagagcggttattgcgggaacactcgcaaaccttctcagcgcggcgattgccggcatgtttatttagtaaacgataaaagctccctgcatatgcagggagcttttatgtatgaaaaacgggggatatttgtattgtgtccgagcagaagagcttttatactaagtaaaagaaaaaaagttggaggccgatatgaattcattccgttttaccaagatgcacggtcttggaaacagttatatatatgtaaatcaatttgaagaacagctgccggaagaacggctggctgagattgccgttaaagtgtccagcattcacacgggcatcggctctgacggaatgatcctcatctgtccgtcagaaaaagcgcccgtcaaaatgcggatttttaataatgacggctcagaagggaaaaattgcggcaacggccttcgctgtgtggcaaagtacgcatacgaacataagctgacagaagaaacgtcctttttcattgagacgctttcaggtctagtgaaagcagacattacagaggacaacgggattgtgcgtgaagtcgccgttgatatgggcgaaccgcgcctcaccaaaaaagagctgccgatgctcggcaatgaagatgaacggacgatcgatgaaacctttgtttttggagaaacggagctttccggaacagccgtatcaatgggaaacccccatattgtttttccggttgcggatatcaatcaagcgcctcttacaacgctcggtcccgtcattgaaaaagacccgagatttccggaaggcgtcaatgtcgaatttgtggaatccgtcagcgccgatgaacttcatttccgcgtatgggaacgcggctccggcattacacaggcttgcggaacaggcgcctgtgcggcggctgtcgcatccgtattgaacggtgtttccgaacgaaaccgggatatcaccgttcatttagcgggaggcgaccttgtgattaattggcaggacaacgggcacgtgctgatgacgggacccgccgaaaccgtatgcagcggcgtctattatttgtaaacagctcgtttgagaaatactctcctcaaggtttataatagatatcagcatccgttttttaaaaaaggaggtctacctatgagtgttccagtaaccatcactgaagcagcggctttgcatataaaagatatgatgaaagagcatgaagaagaaaacgcgtttctccgtgtgggcgtaaaaggcggcggctgcagcggcctgtcttacggaatgggatttgagcacgaaaaaggcgaaaaagacagcatgtttgaacagcacggaatcaccgttttggtcgacagcgaaagccttgatattatgaccggcacgatcattgacttcaaacagtccatgatgggcggcggtttcaccattgacaacccgaatgccatcgcttcctgcggctgcggttcatctttccgcacggccaaaaacgccggtacgccggaagagtgttaagggtcaacccgccattcttaggatgaaaaaatatgacgtctttctttccggtggcgcttgcaccattgttaaaaaaggcgtttatctgtttaataaaaggaaaacccgctcaacagaagcgggttttcctttttcaaagaggttattcgattgtatgtttcatagcatggtacatatttgccgtatgttcatcggctttatcccgtgacatgcgcagccgttcttctgaagaaccatatccgatttcttgtttgccctctttcagtcctttaaaaatcccatcagcgaattcatccagcggttctccttgagtatgcagccctgctccgcctaaatctgtattcaccgccggaggcgcaacttcaatcacttctacagatgaatcagaaagctgatgtctcagactcattgtaaatgaatgaagcgccgctttcgttgctgaatagatcggtgcaatggcaagcggtgtaaaagccaatcccgaagagacgttaatgaaagccgcatcttcttttccggcaaaaaacggagcgaacagcatagacaggtggaagggagcttcaatgttcgttgtgatttctttattgaaatagtcccaattgtccttcgcatccgctttcagcacatgaaaacgttgttgaatccccgcgttgtttactaacacattcacttccggataattttctttcacccaatcaaacagtgatatacgttcagatggaatgctcaaatcactgacatatgtaataagatccgggaatgtttcctttgctttttgaagagcgtgctcacgccgtccggtcacgatgactttatttcccgcttttaaaaaccgttctgcgaaagccaatcctattccggcatttccgcctgtaatcagtattgtatttcccgtcagtttcatattaactcctcttttccgattgtttttacatttctttgtcacatttcagctttgatccaatcaatatattcatcccgcaaataggcatgaaataagacagcagtgattctgtaaaattgattttagatcatcgggaaacccgccaaaactattctttccttgtcacaatatgatgatacggcttaaagcacggtttaagtcaacaaaagaaccttgtgcttccgtttcggttactcacatcagacataggtcacgaaaggaaaggtgaacgtaaagtcttggaattttcttaatgcgataaagcgtaccgtatcacatgggtgagaggcaattaaaaaaacgtttctgatcaaaacaaaaggacggcgatgcatatgcaggaaggaaacagcgttgatatcaggccgctcagcttgaatgatgcagagcaggaactggttttgcagacggaaaaccgcatgttttttgaacggtttgccatgacgagacaagaggatttttatacgctggaaggccggaaaaaacgaattgaacaatcactgaagaatgcagaaaatgatactgaatacagcttcggcatttttcttcaggatcagaccctgattggcacgatcagcctttttcaggtggttcggggttccctccaaagcgcttttatcggttattttttagatggcaaatataacggaaaaggctatgcgacgaaggctgttaagctggcagtcgaatatgcattcaatgagctggaactgcatcggatagaagccggagttatgccgaacaataaggcgtcaatccgggtgctcgaaaaagctggctttcataaagaaggcattgcgagaaaaaatgtaaaaataaatggaaaatgggaagatcatcaggtgctggcgatcatacatccggaggatacatgacgatatcctccttttttatatcctgcgtctctttcgacagattcttcctaaaacttcaaatcaattgtctaaatcatactatttgcaaattcgaaaaaaaataaagggtacatagcaccgaaaactctgaaagatgtgctctttgtcaacacgttctaaagtcatatttttcgaaaggatattgattttttgataggattaaactaaattgtaaaagtatagaatagttaatttattttgtaagaaaaggatgataatatgataggtcaattgagcaataaaaaaatatttttaagttcttttttcatcattttgatctgttcattactcttccaattcagtatttcagataaagttctgcagtcgtattattcttccgtcggagaaaatacctacgatatcggggagaaaagtgttcgtacgattgtcatgtttctgcaagggtttatgatcttcacaacttttgtggaaattctgataggcggatttctgttattcgttgccgcttttattctcggtacaaaaaaaccgaaaaaaatatatttgcttctatatacgctgacttctttaatctcggcatttaaaatgttgattctttcagttgttaactacttaacggctgattcctcgcttatatattctgccggcggcaccagcttgagtctgcagctgctggatccatttctgctcatatcaatcgcggctctttatgctgctgcgggaaaactgaccgatctcagtaaaggcaagagaatcattttgactggatgttttgttttactaaaactctttactattttcttaaactattttatggcggataaaatttagctcgggagagagtcaattaagctgaattttattataaattaaaaaacagagtagggagatgttatgatgaacttagtaaaatctaataaaaagtctttcattttgtttggcgcggctcttgctgcagcaacattggtttatgcactattattaacgggaactgaattaaacgtggcggcggctcatgcattctcagccaatgctgaattagcttctactctcggcatctctacagcagcagctaaaaaagcaattgatattattgatgcggcatcaacaattgcttctatcatttctcttatcggtatcgttacaggcgcaggcgcgatttcttatgcaatcgttgcaacagcaaaaacaatgattaagaaatacggcaaaaaatacgcagctgcttggtaaaatcgatcaataaataattgctctttttgtacaagctgcaaaaagagcctctctcccaaatacatatgtaaggattgaaagtatgatagtcaaacaaattgcggctcttatcaaatataataccctgtcatcgtttcgaaaaagaaaggaagattggggcattcctcaactcaacagcaaactgctgtctgccattattatttctctgttatgtttatatctcgttttcctgggatgcggtgttgtattcgggacaaaactgattcagctgcccctaagcgcatgggggcaatttgttttaatcgccgtttcacttgagcagcttttttgggctgccggcttctttaaagaacaccacaatgcctttctgctggatacgcgcaaggtcattcatcaattaaaaaaggttcgttttttacagctgttttctgtttttgccggccaggcgatcaaaaaaaccattttcgtatggtatctttttgtttttccggtctttttgtttttatcaagcgcaggcatgaccgggtctgcggcggtcatcgtatttttcttgggcttcgtttattttcttctcaatttatttttatctatgctgttttcttatgttgtttatcttcttacaaatatgtggagcaaattgttttacttgaaaatcatgaaaggcattttattcagcgtcagcctgctggttccgcttgcagtcgggtatgccgtttatcttctcgtgtttggggagtataccgcaaaggatatttcaagctttacggagtcaccggctttccggaacatcctcatgaatacgccgtatgtatggttagcattccgctcacattccgtgctcgttttcgccgcggtgtttgcggccgccgtccttttaacggcggggatgtttaaactgtggtcggccacgctgaagaaaatggaccttattccttatatgtttttgacaaacgcagattttgcgccaaagctgaaattatatagaaataacaaaatatttcatgccgtttttcaaaaggatctgctgtttttatcgagaattgacgggttttttatcaggaacttcggcagtatgctgtatttgttcatgctgtttttaggtttttgtattccgcttctgtcgcatcattttatcgggtattcggcagccgccatcgtgtctgcggcggttatcattgcgaacttttcgtatcagctcgtcggagatgcgctcaaaacagtattatcagttgacggagaaataaaaaatcagcatctgtttcaccgaaatatcaaacatgcgtggcagctggtgtttccgaaagtatgtatttataatctcgccgctcttatctattcgttcatcatcaccattttgattacggtgttttttccgtcttccgctgcgctgacgatttacttgtttattgtgtttttatgttcgggttttttatacagtcttgtccagatttcaagcaccgccctgtatcctaagaaaaactgggagcatatgtacgaaattggagaagcggggaaagcaaagacgtataacaacttatacggatctttcattttcattgtgtcgcttcaaatcgctgcgatcacgtcgtattttatctataaaaagccggaacttgaaacgatgcttattcattctgcatcaggtatttttgtcctgttcacactattaaactatggagtcatgtttctgtttcttcgcagaatcaatatggcggaaaggtttgcgaacaatgattaaattagtgaatatacaaaaaaactatagtgaaaaacaggtgttgaaagatatttcgtttgaggtgaaaaaaggctcaatttatgctttgctggggactaatggagtcgggaaaacaacgactttgaaaatcatttcgggcctgcttaaaccgacttcaggcagcgtcatgattgacggtaaggaactggattcagaagagggggggcaaatatcggctgatatcggttttgtgcccgaccatgcctttttatatgattacttaacgggagtcgaatacttgcgttttacagcggagatgtttgaagtaccgtctcagcggacaaatgagtatataaagaatatgttagagacgctgaagcttgctcaagacggaaatcagctgattaaaacatattcacatggaatgaaacaaaaattatcaattgcggccgcgctcattcatcagccaaagatattaattcttgacgaaccgctgacgggcattgatttaatcagcggtaaaacgatacggacgttattaaaggagtacgtcaaacagggacatacggtcctgttatcgactcacttgctggagctggcgcattcgctgtgcgatacaatcggtattatacatgaaggcgtttttgcggcggagtatcagtcatccgagcattcattagaagagattgaaaaattggctgagagtatttatacatgatgaaccgcatgttgccggcaatcaggacgtccgtcattccgttaaccgcatcattgctgtttttttcaggcggtgtgatcgctgcgtttttttccgatcactttgtttcaacagcgtcttacaacggctcgtcaggcgcggttgaactgctgaaaaacaatgcaatcgcttgtctgtttttagccgcgggtttttttacctttgggttgacctcaatcttttatttattcaccaacgggtttattttaagcggctctattatagaaaatctgcatagcggggttcctttttatcagatttttttactgctaattcctcatggtatatttgaagttcccgcgttattattaagtggcgccattggttttaagggcgttgaattggtcatcaggctgtgtttttctaaggaaaaaaagataatggcttcaatgttcaggcatattggaatattggtgctcataattatttgtctgctgatcgccgctgccattattgaagcttacatcacaccaatttttaagtaaaaggggcagaaatcatatgagaagtaaattatcattaatcggtgtgccgattgttatgattatcggttatatcatttctttatcctttgagtggctgtttcctgttcttacttttggggtggcaggactgtatctctttatatttgcaccggtgcaaaataaattcattcgttacatctttttgtttatttttgtgattaatctgttggccagtgcggctctttatttcggtatttaataaaaaaatgacattcatattgaatgtcatttttttatttttttttgcggctctgctgcgtgttaaaatctgtcgccgttgaaaatagagttttttacgatcacgtagtcgacattgcggatggcttcaagtgtattgccgccggcgtaagagatggaagattgcagatcctgctccatttcaaccagcgtgtcctgtaaagaccctttatgttcgacatgcatttttttgccttcgacgtttttcttttcgcctttttgaaattcagaagcggagccgaaatattctttgtacagcttgccatcgatttcgatcgtttgtcccggtgattcttcgtggccggcgaataatgatccgatcatgaccatggatgcgccgaatcggatggatttcgcaatatcgccgtgcgtgcggatgccgccgtcagcaatgatcggtttgctcgccgcttttgcgcaccagcgaagcgcggctaattgccacccgccggttccgaaaccggttttaattttggtgatgcagactttcccggggccgattcccacttttgtcgcgtcggcgcccgcgcgttccagctcccttacggcttcaggcgtcccgacattccctgcgatgacaaagctttccgggacatgttctttaataaattgaatcatgctgatcacggcattggaatggccgtgcgcgatatcaatggtaatataatccggcacaagctcctgggctttcagctcccggatgaattcataatcattttccttcacgccgacactgatggaagaaatcagtccgcgcgctttcatatcccggacaaaagccaggcgtttttccggctcgaagcggtgcatgatataaaaatacccgttttccgcgagccaggccgcgatgttttcatctataatcgtctgcatgttggccggcacgaccggaagtttaaacgtgtgtccgcccaatgtaactgatgtatcacattcagatcggctgtccacaatgcattttgcaggaatcagctgaatatcttcgtaatcaaatacattttccatatataacacccctaaaagcgaataatagaattaaataaaattaaaatgttcgtctttttataatgtactttgttttgtcaggaatgtcaaatgatttcatgctgcctcatatgcggtcagcttgtcatccatttgcagtttggttatcatagtagtattgggtgttgtaagacatttgttacgatagatagatttgcaaagaagggaggggccggtgtggaacaaaaacagcccgggcacagcccgaaagcccagaaaattcaggaccggattattttaggcacgatttgggtcgtgtcggcgcttgtcattgcgctcgttgtcggaaccgtcatgaattatatttggatgtttaaataaaaaagagtctgtgccggtatgacacagactcttttttatattatttttcaaacatgcttgtagaatgcattggctggacacgcgctttcgggtccatgtaggccttcgcgttgttcacggctgtcggagcttcgccgaaaccgctggcgatcagcttgactttgccttcatatgtgcagatatctccggcggcaaagaagccttcaatattcgtttccatcgtgcttttgacgacgatggaatttttctcgatgtcaaggccccagtttttaatcgggccgagagaagaaacaaagccgtagtttacgatcaggtcatcaatttcaatgatttctttacggtcgcctttcacttcttcgagaacgagctgttcgatccggtcttcaccgacaagttcagcgggaacaaacggtgtcagcacgttgactttagaattatgcaggttttcgacactgtgctcatgcgcgcggaatttatcacggcggtggatgatgctgacttctttcgcgatcggctcaagcatgagcgcccagtcaaccgcggaatcgccgccgcccagaacggcaacgcgtctgcctgcgaattgattgaggtcgtcaatgaagtaatgcaggtttttgccctcatattgttccgctgattccagctcaagctttctcggcttaaatgcgccgtttcccgcggtgataataaccgtttttgaataatgcgtttctgaattcgtgacaagcttaaacacaccgtccgcctgtttttcaacagattcaacggcctgctctaagcagatggtctgatcgaactttgccatttgctcttttaagttgttcacaagttcttgggcgcggattttcgggaatccggctacatcataaatatatttttcagggtacagcgcgctgagctggccgccaagctgaggcaggctctcgatgattttgacgctcgcctgtctcattcccccgtaaaaagcggtaaacaggccgaccgggccgccgccgatgaccgtaatatcataaacctttgaatcctcttgcataccaaattgcctcctaattgaaaattgttattaattataacatacaatttaaaaggatgacgagtgccgaaaaccgcccggccgcttcattcttgaaaaaaattgcggccgccgctaatatggggacaaattccaatctgttttttcctgaatgttttctgattcttccggatagtatggtgatatgcagacatgtgcggttttctaaaaaattttatatttcatttcataaaatcccgccaataagctgaagctaatacaaatgttgatttgattatgcgtctaacagcaaaaaaaagaaggtggatgtgatggcattgaataaacccaaaatcgtggttttaggtgcaggttatggtggattaatgacagtaacaaggcttccgaagcatatcggggcaaatgacgctgacattactttggtcaataaacacaattatcattatgaaacgacatggatgcatgaagcgagcgcaggaacgctgcatcatgaccgctgcagatatcaaataaaagatgtaatcaatgaatcacgggtcaaatttgtgcaggataccgtaaaagcgatagatgtgcaaaataaaaaggtgacgctttcacaaggggacatcccttatgattatcttgtcatcgggcttggcgccgtccctgaaacattcgggattaaaggcttaaaagaattcgcttttccgatcgcgaatattaatacgtcgcgccagctgaaagaccatattgagctccaatttgcgacatacaatacggaggccgaaaaacgccctgaccgcttaaccatcgttgtcggcggagcgggctttacgggaattgaatttctcggtgaacttgcgaaccgcaagccggagttatgcagatattatgatatagatgaaagtctcgtccggatcgtctgtgtcgaggccgccccgacggttttgccgggatttgatccggagcttgtcgattacgccgttcaataccttgagagcaaaggcgttgaatttaaaatcggcaccgcggttcaagaatgccgcgcagacggtgtcacagtcggcaagaaagatgaagagccggaagaaatcaaatcccagaccgttgtctgggcggcgggcgtgcgcggacatccgatcgtggaggaagcgggttttgaaaatatgcgcggccgtgtcaaggtcaaccctgatcttcgggcgccgggtcatgatgacgtttttatactcggcgacagctcgctctttatcaatgaagagacggaacggccgtacccgccgactgctcagatcgcgatgcagcaaggagaaacggtcgccaaaaatctgggcggtttgattaaaggaggccagcttgaagagttcaagcctgacattaaaggaaccgtcgcctccctcggtgagcataacgccgtcggagtcgtatacggcaggaagctcaaaggcatgccggcgtcctttatgaaaaaggtcattgacaaccgatcgctctttatgatcggcgggctgggcctgacgctgaaaaaagggaagtttaaattcttctgaaaacccgcggccgcgggttttctcttcttttaaaaaagagcgctatcaaaagaatgtaaaagaaaaaaatgaatgttttcgcttacatgagttattttgttacatattctgacttggtgcttgacaagtaaatatgatatattatcagaaaattaagaaaaagggtgatccgcatgaaaacgacagcaaaaagcacggcggcgtgtccgttctgctcaggtaaagggtattttcaattgcttcttggcggctccgaaacatgtccctcctgccagggaagcggcaaagagagacgatgatttttccagacgttgacttttttaccgcccccgaggtacactgaaagtgctgtaggggggtggatgtttgtgattagtttgccggttgtcctgatctcaatcgtactatttttcgtactgtttttcggcataggctttctgttgaacatgctgcttagaatgtcgtggattatggctgttgtctatccgattgtatgccttttcattatcagcaataaaaagatgatcagttacgtgcaggcgccgggggaatcctttcaaagcctgtttcagcgcatcatgtcattagcggttgcggatgtcgtgattttggcgggcggactggcgggagccatcatgtcaggcattgccataaaggcgctcagaaaaagaggatatcaaatgttttaagccgctttcttattcgagaaagctttttttgtgccgcggcgctttttgtatagcacctcaccgagttgggaacaatgactcggaggagagtgatttcagattgacgataatcagacgcgtattcatgatcgtgctctttttgggcgcatgccatgcgacatacttttccataaccggtgttgaagcaaaggatctgacaaattggatgacggaacatcgcggcgccgttttgaaaaacatcggcactccgtttcaatccttacagaatcagccggaaaagaaggcatcaggcaggataaaaccgctggaagaagcttttgactgggaacgctatccgtcacaaaaggtgacggccaccggttataccgccggagcggaatctaccggaaaatctccgggtcatccgcagtacggaattacatattcaggcgtgaaggtcaaacgcgatttatattcaactgttgcggccgatccgtctgttttcccgatcgggacgattctgtttataccgaattacggatacggggttgtcgccgataccggctcaaaaattaaaggcagccgccttgacctctactttgacaccgtcaaggacgtctataacaattggggcaaaaaaacacttgaggtctacatgattaaaaaagggaacggcacagtgaccgaggacgaacttgtaaagctgaacgaaaccaagtcgatgcaagtgttcagaaatcaatacaaaacggtaaaagaataaaaacgcttcagcatccgctgaagcgttttttacataaagaaataatctaaaatcaatgtcagcacaataccggtgacgccgccgaagaacacttcaatcggctgatggccgagcagttctttcagtttcttctgtttttccttctcttccgctttctgaaagtccttcgcttcgctgacaaaccgattaaagtcgatgaccagtttattaatgaccgtcgcctgttcacccgcatgccgcctgacacctgtagcgtcgaacatcgtaatgacggcgaaaatcgcggcgactgcaaacaggggcgagtccagcccctgttccaaagcgactccggttgacagcgcagtgacggcggcggaatgggagctcggcatgccgccggtgctcgtcacaagagaccagtcaagttttttggatacgataaattgaataggcacttttacaacttgggcaaaaataatggcggcaaaactcgccagtaaaggaaaattcataagtacatccatatgcgacatcctttctgtatctgctgattccgatcgtatcgaaaaactgcagaaaacgcccttagtttggtaaaataaaatcaatgaaaaatgttttttcattataccactttacataacaaatacccacataaggagtgtgtactcatgttttatgcatctgatcaactgcggcatcctgaaacactggtcatcggtctttttcaaaaaagcacgctgaacggatttacgaaggaattggatgataaattggacggtcatctgacccagctgttaaaggatggtgatgtgtccgccaaacgcaatcgtgtatcaaaagtataccctccggctgcgaccggtatgaaacgtatttattttatcggcctgggaagagaagcggattattcgtttgaagatacgaaagaatgctttgcacgagtatttcagcagattcatcaagataaaaaacaggaagtatccgttttgctcgatacattcgtctccggggaagtgcctgccgccgatgccgctcatgcgctttcagaaagctgtctgcttgcggtttacgaagtgcaggattataaacataaatcgaatgagccggatcaggaactgaaatcagtctgcgccgtgaccgaagaagacctgagggaagtgcaggccggcctgaacgtcggagcggcatacggccaagggacgaattcagcccgcacgcttgtgaatatgccgggtaatatgctgacggccactgatttggcgtcatatgccgccgagcttgcggcaaaatacgatttcgagtgtgaaattttagaaaaagatgaaatggaagagctcggcatgggcgggctgcttgctgttaacaagggctcatccgaaccgccgaaaatgatcgttctgaagtatcagggcaaagatcagtgggaagacgtcatcggcctggtcggtaaaggaattacctttgatacgggcggatattcaattaagccgaaaaccggcatcgtcggcatgaaaagcgatatgggaggggccgcatcggtattaggggcaatggagattatcggcgaactgcggcctgaacaaaacgtgctcgccgtcataccgtctacggacaacatgatttcgtccgatgcgatgaagccggatgacgtcatcgtttcgctcagcggaaaaaccattgaaatcctgaacaccgatgcggaagggcgtctcgtgcttgccgacggcatcacatacgccaagcagcacggagcctctgtccttgtagacgtcgcaacgttaacgggcggtgtcattgtcgccttagggaacgaaatgacgggcgccatgaccaatcacgccgcgttttatgaacaggtggcggaatcggcgaaagaatccggcgagccgatctggcagcttccgattacagaaaaggataaaaaacgggtgagaaacagtcagatggctgatttgaacaattctccgggaagagaaggccacgcgattatggcgggggcattcattggtgaattcgcggaaaacacgccgtgggttcatctcgatattgcgggaaccgcgacggcgaataaagcgacatgcttcggccctgccggcgcaacaggcgtcatggcaaggacgttggctgttttgactgagcgctttacgcccgaaagataacagcatcccgctgccttgatgcagcgggttttttgatttccaaaatctttagttgactaaagcgcagaatatatggtaactttaattatctactacattagcaaactaaaggatttttggagggactcatcaatgaatgctgttgttatcgcagtattgcttatgctcgtcttaagcctgctgcgtgtcaatattattatagctttaatgatcggcgcgcttgccggcgggctgaccggcggcttaggcctaggagagacggtgaaggcttttacggacggtctcggcggaaatgccaccgtcgcggtcagctacgcgctgctcggagcatttgccgcggcgctgacaaagacggggcttcccgatgcaatggtggaagcgtctgtcaaactaatcggaaaaaaggaagattcgcggaaaaaagcactgtcaaaagtgttaatcgtactgattattttaatcatatcctgtttctcgcaaaacgtggtgcccgttcacattgcgtttattcctgtattgattccgccgcttttaaaaatatttaacgaacttgaaatagaccgcagactgatcgcgtgtgtgatgacattcggactgactgcgccgtatatcgttctgcctgtcggattcggacagattttccaggggatgctgagagataatatggcggcagccggtttaaaggtgccgctcagtgatatcccttatgctttaatcattccgacggccgggatggtagtcggtttaattttagccgtcatcgtcttccggaaaccgaagaaatatgagacgaaggagattgccggactatcgtcttctccttatacgaaaaaaagcattgccatcgccttgatctccattgccgtgtcgcttgccgttcagctctatctgtcacaagtgctcggagtggaaggtatgatcatgggcgcgcttgccggcttgtttacgctgtttatcagcggagtcatgaagcgcaatgaagcggataagctgatcacggacggcatgattctgatggcttttatcgggtttgtcatgcttgttgcggccggtttttcaaatgtattgaataaaacgggcgatgtggcttccttggtcaaagcatcaacaggctttatcggccacagccaatcattaggcgcgctcctgatgctggtggtcggtttattaatcacgatgggaatcggatcatcatttgcaaccgtacccgtcattacgaccatatttgtcccgctgtgcgctcagctcggattcagtccgatggcgacgattgccgtaatcggagcggccgccgcggtcggtgatgcgggttctcctgcaagtgacagtacgctcgggccgacgtcaggcctcagcgccgacggacagcaccaccacatttgggatacgtgcgtaccgacatttattttctataacattccgcttgtgatattcggctggattgccgcgcttgtcctgtaaaaaaaggctcccggaaaggggagcctttttgtatgctgagaacatcttacgccgggtttctgctgaaccccgtcgctttatgaatagacctgtaaacggcaggcgcgattgatgccaataacagtgctaaaacgatatcttttatgaaaaaccatatcatgtaaaaccaggccattccgtagctgatcggagcatgaagccataatttcagcgcaatatacgtataggtcgtgccaatgatataaatgacggcggtaccgatcaaagaggcccatgcataatgcaggcggccgggtttttttgttttttccagcagccatccggctgcaaatgccgccgggatataagcgagaataaatccgccgctctttccgataaacggcgcaaagcctgctgagaattgagcgaaaacaggcgcccccgcgagtccggccaatgcgtataccgtcattgcaatggctgcccgtctggcgccgagaagcatcgcggctaacagacaaaagaaaggctgcagcgataacggaattcccgcaacttgcaaaaaaggagccattgatgtaatgttggcgccgacggccatcagtgcggcaaacatgccgataagcgccatatcgcccgcgcgaaggttgcgttgtttcatttgtttttcccccttacacttgtaccagattagcgtaatcgaagggtgattgattgtcaacaaagatttaacacaggtttactaaatggagggagccatatgtttttcgggaaaacgaaacaaacaaaacagtcggaacggattccgccaaatcaaaatgtcacaacgaagtttcccgtgcttcacgccggaaatgttccttattatgaagatatgtcaaaatggaatctgcaagtgtacggacttgttgaccgtcctatgctgttaagctttgaagatatcaaagcctttcctgaagccgaagtgaaaaatgatattcattgcgttacgggctggtcccgtcttgataatatctggcagggaatacgcgccaaagacatcgctgagaaagcgggcgtgcacaaagaagcgggattcgtcattctgcacgctgaagagggctggacggccaacctgccgctttctgattttgcgcgggaaacatccctgctggcatatgcgcataacggcgagccgttaacgccagagcacggctatccgctcagaggcgttttcccccatctttatttttggaaaagcgcaaaatggctgcgcggcattcagttcacaaaggaaaaccaccccggcttttgggagaaaaacggctaccatatgaggggagatccatggaagaatgagcgctttacatgggattaagcccctatcactatatagttcttaggtaccttattgaaataaggtgctttttttatatcaaaaatccattgactttgtttggcaaaaaacctattatttgaggtgtcttttgatattgaaaatcattatcaataagcatagataaagcaattgccgcaaaggggatgaacacataatggacggaaaacaaataaagcggggtttcgcgccggccggccgatacgcggttccgggcacagaagtaagagaaatgcgctcaaaaggaggccgtatgtatcgtatctttgtctcttttcctcaggaagaaccgcctgcatccggcttccccgtcatatacctgctcgatgcgaattccgtattcggcacaatggccgaagctttgcgggtgcaaagccgacggcctgaaaaaacaggcgttgttccggcggtgattgtcggaatcggctacccgacagatcagccgttttccgccgaacgtcacagtgattttacgatgccgctttctgaatcagaactgccggtgcatccgcgcggcgcggcatggcccgaacagggaggggcggaagcgtttctgagttttatagaagaagaagtaaagcccgcgatggagcgggattatccgatcgacagaggcaggcagacgattttcggccattcgctgggcggtctttttgtgctgcaagtgcttttgatgaggccggacatgttccagacctatgttgccgggagtccgtcaattcactggaacaagcgttttattcaggaaaaagcggaacgtttgtcagaccggctctctgcggaaaatcttcaagtcagcgtattgctggctgcgggagaaattgaaaaaacacataaaagcagaatcccgcagcacgcagaggcgctgtactctttattatccggatttgaagatgatggagtccgtgctgaatacagcgagtttgaaggagagggccatatttctgtcctgcccgttttaatcagcagggccctgcgtttctgcctgaatccgggaggaccgcataccccgtattctcccgcatgagaaaaaacaggcccttcgaactaaatgcggctgattctaattttctaattgactgcgtgttttgatttggatatgattgtcttgaatcatagttgataatgataatcattatcaatatagaaagggaatgataatatggacgcattgggaatgaaagggaaaacggccgttgtcaccggcgccgctcaaggcatcggagaagcaacagcgcttgcccttgctgaacaaggcgtaaatgtggcagctatagatacaaatcaagacttgcttctcgggcttactgacagacttcggaaaaaaggcgtgcaggcgcaggggtttgccgcagatgtatctgacagtgcggctgtcaatgatatcatcgccgccgttgaacgcgacatgggacctattgaaatattggcgaacgttgcgggcgtgctgcggccgggtccggtgcaatccctcagtgatgaagattgggatcaaacattttctgttaatacgaccggcgtatttcatgtgtcacgggctgtaagccgatacatgattgagcgtcaaaaaggcgccatcgttacggtcggttcgaatgcagccggcgttccgcgtgcttccatggcggcttatgcggcgtcaaaagcggctgccgtcatgtttacgaaatgcctcggactggagcttgcggcccatcatatccgctgcaacatcgtatctccgggttcaacggaaaccgacatgcagcgggcgctgtggcaggacgggaacggagcccgggacgtcatcagaggttcgcttgatacatataaaacgggaattccgcttcaaaagctggcgaagccttctgatattgcaaatgccgttttgtttctggcttctgaacaggcaaaccatattacgatgcatgatttatgcgttgatggcggcgctactttaggcgtttgatgtaacgagaaggagggacaaacatgacaaatcaacatttattggcggaagtgtctgcaaaagaggtgctggacgcttacaagcccggggcgttctttttagcttccccgaaaagtacgatgcttgcggaaggaatgtttgcggaagtgcctgatacagacgcggaaaatcagctggattcactgcctgaacgcgtgagacagacgcttcttgaggcaaagcaagccggcatcaaacatccgattgcggccggcgccattccttttgacggcagaaaagcttcccggctttttgtaccgaagaatgtccatacggcaggcccgctttcgtttgcggaatcttccgcagaaaagccgcaatccaatacatatgacatccgtcccgttccggagcctgagggctttatgagcggtgtggaacaaggcgtattcagcattacggacggtccgctcagcaaaatcgtgctgtcaaggacgcttcatctgaccgctgaaaaggatatcgacattccacaggccgtcaagcatttggcgcagcacaacccgcgcggctatacattcgctgcggatgtgacgggaacgtcagaaacaagaaaaacgcttttcggcgcaagtcctgaactattgctgtccaaaaacggaacatcgattctgtccaatccgctggcaggttccagacctcgcagcacagatcccgccgaggatcagagaagagcggaagaactgctgcaatcagcaaaagatctgcatgaacatgccgtagtcgtggccgccgtggccgccgcccttaaaccgttctgccgtgtgcttgatgtgccggaaaaaccgtcactcattaaaactgaggcgatgtggcacctgtccaccgaggtaaagggagagctgcgtgatccgtcaacgacatcacttgagctggccatcgccctgcatccgacacccgcggtatgcggaacgccgacggatgcggcgagagaagcgattcaggatattgagccgtttgaccgcaatttctacacgggaatggcgggctggtgtgatgctgagggtgacggagaatggattatcgcactccgttgcgccgaagcggaaacaaggtctctccggctctttgcgggtgccgggattgtcgccggatcaaagccgcaggatgaattggacgagacctcggccaaattccgcaccatgctccgggcgatggggctttaccaagatgagttgtaaaaaaggagggaacggatcgtgctgactggatttacgccatggccggaagaatgggctgacaaataccgaaaagacggctgctggaagggtgagacgttcggaggaatgctgaaagagcgcgcggctttatacggaaatcaaactgccgtgacgtgtaaagatgtacattggacctacaaagaattagatgaaagggcagatcgtttagcggcggggctgcataagctcggaattcaaaaggaagaccgcgttgtcgttcagctgccgaatatcgctgagttttttgaagtgattttcgcgctgttccggctgggagcgctgcccgttttcgcgctgccttctcatagaagcagtgagattacgtatttctgcgagtttgcagaggcgaaagcatacatcattcctgatatgcattcaggttttgattacagggcgcttgccagacaggtgaaagacaaacttccggatttggcgcatgtcattgtggccggcgaagctgaagagtttcaagaactgagcagcctgcatagagagcctgttcagctggaagatataagcccggcggaagtcgcctttttacagctttcaggaggcagtacggggctgtccaagctgattccgcgaacacacgacgattacatatacagtttgcgcatcagtgcggaaatatgcggcttggatcatcacagcgtttatttggccgctctgccgacagcgcataattatccgctcagctcgccaggtgtgctgggaactttatatgccgggggccgggttgttctgtcaccgacgccgagtccggatgactgcttcccgttaattgaaaaagaacgtgtcacgattacagcgctcgtcccgccgcttgcgatggtgtggatggacgcatccggttcgcgaagtgatgatttatcaagccttcaagtgctgcaggtgggaggcgccaaattcagtgctgaggcggcccgccgcgtgaagagcgctttcggatgcacccttcagcaggttttcggaatggcggaaggattggtgaattatacgagactggatgatcctgaagagatcattgtcaatacgcaaggcagaccgatgtctccttttgatgaggtaagggttttagacgatgacgggcgggatgtcgcccccggtgaagcgggacatttgtttacacgcggcccttacacgattcgcggatattataaagcgcctgaacataatgaaagatcattcacagccgacggattttatcagaccggcgatatcgtcaaactgacggcggacggctatatcatcgtcgaaggacgtgcgaaagatcaaatcaatcggggcggtgaaaaaatagccgctgaggaggtggaaaatcaccttcttgcgcatcctgccgttcatgatgcggccatggtttcaatgccggatgattttctcggggagcgttcctgtgtgttcgtcatcccgaaaggagaagcgccgaaaccgggagagctgaaagcatttttgcgtgagcgcggactggcggcatataaaatccccgaccggattgaatttatcgcttcttttccgaaaaccggcgtcggcaaggtcagtaaaaaggatcttcgcgaaacgatcgcccaaaaagtaaagccggctgaaatcaaacaatcttaaaaaaggaagtgtttacattggctataccgtctattcccgcatatgcgctgccgacagcgtcagatatgcctgaaaataaagtatcgtggacgctgaatccgaaacgcgcggtgcttctgatccatgacatgcagaattatttcgtcgatgcttttgcgaaaggtgaagctccgatcacagaggcgtctcagaatatcaaaaaaataaaagagcaatgcaaagcactcggcattccggtggtgtataccgcgcagccgggcagccaagacccggcggaccgtgcgctgctgacggatttttgggggccggggctaaaaagcgggccttatgaagaaaaggtcattccggagcttgccccggatgatcaggacattgtcctcacaaagtggagatacagcgcgtttaaacggacgaatctccttgacatcatgcgtgaaagcggcagagaccagctcatgattacgggaatttatgcacacatcggctgtctcgtcacagcctgtgaagcatttatggatgatatccaaagcttctttatcggagacgccgttgctgatttttcttcagaaaaacataagatggccatcgaatatgcgtctcagcgctgcgcttacacagctttgacaaacgaagtgctggagctgctgggcggcgcgccggtttctgaaggagaagggaaggcttccgccgtattgacaaaagaccgggtgcgggaacaaattgcggcgattcttcaagaatcaccgtctgatattccggatcatgaagacctgctggacagaggtcttgactccgtcagaatcatgagtcttgtcgaacaatggcgccgtgacggagctgaagtgacgtttgtggaactggcggagaacccgacgctggaagagtggtggagacttctttcttcccgatctcaaaaagtcttgccgaacgcagattatttataaagggagagaatagaatgcatgatacacaacagctgcctctgacaggcgcacaggccggtatctggtttgcgcagcagcttgatcctgataatccgatttacaatacaggcgagtacgttgagataaacggcgcgatcgatgtgaacatatttaaaaccgctctcgaacgcgtgctgacggaagccgcgtcattacacgcccgcttcgaggagggagcagacgggccaaagcagatcatcaatcctccatttgaggctgcgatcgatgtcatagatgtgagttcagaagctgatccgaagcaggccgcactcagactcatgcagacagatttggctgagcccgttgatatggcggccgggcctttgttccgcgacattttatttcgggcgggaccggaacgctttttctggtatcagcgcattcaccacattgcgatagacggctacggtttttcactgctggcacggcgtacggcgcaaatgtacactgcaatacgggaaggacgtccggataacgggcgctccttcggttctttggacgatctggtaaaagaagatcaagagtaccgcgcgtctgatcaattcctgaaagatcgggaattttggatggagaaatttgcggatgaacctgatgtcgtcagtttggcagaaagagcgccgcgaacgtcaacacgttttcggagaagcacggcttatctttctgaaacggctttacagcatgtaaaagcgattccgaactggcatgaagccgtcacggccgcagcggcggtatatgtccatcggatgacaaacgcaggggatatcgtgctcggtttaccgatgatggggcggatcggctcaatttcactgaatattccgagtatggtcatgaatcttctgcctttacggctttctctccgcccggatatgaattttcatgaggccgtcagccaagtggcaaaagaaatccgaaacatccggcgccatcagaaataccgccatgaagacatgcgccgcgaccttaaattgctcggagacaatcgcaggctgttcggcccgcaagtcaatgtgatgccgtttgactacgcgcttgatttcgccggagcgcgggggaccgttcataatttatcagcagggcccgttgatgatttgtcaattaacgtttacgacagagcggacggaagcggaatgcgtgtggactttgatgcgaatccggaagtgtacagcgccgaagatattgaaaaccatcaaaaacgattcctgcttctgttggaatccgctgtgaaagaccagacacaaaaaatcggcacactcaaccttctgcttgaaagtgaacgtctccgcgtactggaaagctggaatgacacgcgcaaggccgagaagcagaaaagtctgccggagctgttttacgaacaggccgtaaaaacaccggaccggccggcaatcatcaccgaaaacgaagagctcagctatgccgaattgaacaagcgcgcgaaccagcttgccggcatgctaaaggaaaaagggctcggaccggaacaatttgccgctttgctgcttccgcggtcacaggagttggccgtgggcatgctggccgttttgaaaacgggagccgcatacctgccgcttgatcctgattttccttctgagcggatcacatacatgctcaaagatgcacagcctgcatgcctgattacaacgatggaattatccggccgcatgccggaagacagtgatgcaaaaaggatcattctcgatgacccggatacggtaaaaaccgttgccgctcaaaatgctgactgtcccgctcaggcggaatgttcgcctttgcaccccgcttatatcatttatacatcgggctcaacgggcaaaccgaaaggtgtagtcgtcactttaaaaagcgtaagcaatttcctcttatccatgcgggaaatgtttacgctcggcgaacaagaccgcctgcttgccgttacgactgcggcgtttgatatttccggacttgagctcttcctcccgctcatcagcggggcggggtgcgtcatcgcacgtaaagagacgattcaggaaccgcgggcgcttgcgcacatgattcactcatacggtatttcaatcatgcaggcaacgccgacattgtggcattcattagtcaccaatgaaccggattctctccgggcgctgcaggtgcttgtcggaggtgaggcgcttccgaatgcgcttatgcatgctctgcttgaatcaggctgtacggtgacgaatctgtacgggccgactgaaacaacaatctggtcggccgcacagccgcttgcaaaaggccatacaggggcgcctccgatcggaacgccgatttggaacacgcgggtatatgtgctggacgccgcattgcagcccgtcccgccgggaatcgcgggcgagctttatatagcgggggaggggcttgccagaggttattataaccgtcctgatttaacagcggaaagattcattggcgatccgtacgggcccgcgggcgcgaggatgtaccggacgggagatctcgtgcgctggcgtgaggacggctcgcttgattatatcagcagagccgatcaccaaattaaaatccgcgggttccggatagaattaggagaaattgagtcagtgctgtcgaaatatccgggtatttcgcaggccgccgtcattgtccgtgaagaccagcccggagataagcggctggcggcttatgctgtcgcggatcagccccttgatatcggcggacttcgtgaatatatgggcgaaagcctgccggattatatggtgccgggcgcgtttgtacagctggaagaattgccgctgacaccgaataagaagctcgatcgcagcgctctgcctgcacctgatttttccgctgtcctgtctgacagagggccgcggacgccgcaggaagaaatattatgcgatctgtttgccgaggttctcggtctcgcgcgggtcggaattgatgacgggttctttgaattgggcggacattcgctcttagccggacgcctgatgagccgggtccgggagacgatgggcgcagagcttggcatcggccgtctgtttgatacgccgaccgttgccgggctcgccgcacagcttgacaccgcaaagagtgcgcggcctaagctcaagccgtttgaccggccggagcatatcccgctgtcatttgcgcagctgcgtctatggtttctctactgtcttgaagggccaagcccgacttacaacattccggtgattgtccgcatgtcaggcaagcttgaccaatcagcgctgaaacacgccttttacgatgttgtcagccgtcatgaaagcctgcgcaccgtttttccggaaaataagggatcatctcatcagctcattttatctgctgaagaagcccgccctgtgtttacagtgacacgtgcagacaaaaacgagctccaagacatgcttgccgctgcggcacgatatcggtttgatctcgctaaagagccggccgtccgagccgagctgtttgatcttggtgacggcgagtatacgctgatgattctcctgcatcacattgcaggtgacggctggtccttgaatccgctcatgcgtgacttatccatagcctatatcgcccggcaaacaggtgaaaaagcagaatgggcgccgctggcggttcaatatgcggattatgcgctttggcagcagcagcttttaggcagcgcgtctgattctgagagcttaattgcgcgccagctggatttctggaagaaaacgcttgaaaatgtaccggatcagctggagctgccgtctgattttccgcgtcccgctgaatcaagctacaggggcggcgtcattccggtcaacatcggccaagagcttcatgcccgtcttctctcacttgccagaaatcagcgcgtaagcctgtttatggtgcttcaatcagggctttccgcgttactgacccggctcggtgcagggaccgatattccgatcggcagtccaatagccggccgcagtgatgatgcattgggagaccttgtgggtatgttcattaatacactcgtactgagaaccgatacctctggcgatccgagcttttgtgagctccttgaaagggtcagggaaatgaatctcgcagcatatgaacatcaggacgtgccgtttgaacgtctcgtggaagaattgaatccggttcgttcccggtcaagacatccgctgttccaagtgatgctcgcattccaaaatacgcctgaccctgtactcagtcttcctgatatggaaacaagcctgcaaatcagcagtgtcggatcgtccaaatttgatttgacgctggaattggctgaacagcgccatgacgacggcacgcctgccggtattgaaggcctgctggagttcagtacggacttatttagaaaagaaacggctgaagcacttgccgggcgcctgcttcttctgctcgaagatgccgcatcacatccggataaaccgatcggaagcttaaccattctttctgatgaagagcgccggaagcttttgccggttaaacgggcaaaacagcatattcagcctcggcagacactgcctgaactgtttgaaatacaggccgccgcaaaatcggatgaaacggcggcagtatttggagagagcggactcacttataaagagctgaatgaaagagccaatcagctcgcgcacatgatgattgcccgcggcgtcggcccggagcagtttgtcgcactggcgctgccgcgttctttagatatgattgtcgggctgttagccgtcctgaagacgggggcagcgtatctgccgcttgatcctgattatcccgcggaccgcattgcttttatgttacatgatgccaagcctgtatttatgctcaccaaccgtgaaggcgcaagtaagctctctatcgaaagcggcatgccggccttcatcttggatgacccgcagaataaagaaacacttgagcgatatgccgtcacgaaccctgcggacgctgaccggattcggccgctgtcaccgcttcacccggcctacgtcatttacacgtcgggatcaacaggtgtgccgaaaggtgtcatcattccgcacagcaatgttatccggctgtttgagtcgacgcggcattggtatcactttcattctgatgatgtatggacgatgtttcactcctacgctttcgatttctctgtctgggaaatgtgggggccgttgcttcacggcggacgtctcgtcgtcgtgccgcatgacatcagcagatcgccggaagcgtttttacatctcctcgtgaaagagcgggtgaccgtgcttaaccaaacgccgtcagcgttttaccagctgatgcatgcggaaaaagaacacaaagagctggggcgtcagctcgcactcagatatatcatcttcggcggcgaggcgcttgagctgagccggcttgaggattggtacagccgccacgcagacaatcagccggtgctcgtgaatatgtacggcattacggaaacgacggtgcacgtcagttaccttgaattagacaaaaacattgccgaactgagagcaaacagcctcatcggctgcggcattcctgatctgaacgtatatgtgcttgatgatcggctggagcctgtgcccccgggcatcacgggcgaaatgtatgtggccggaggaggcgtggcacgcggctacttagggcggcaaagcctgaccgccgaacgctttgtggctgatccgtacggcccgccgggaacgaggatgtaccggacgggggatttagcccgtctgcggacggacggttctcttgattatatgggcagggccgaccatcagattaaaatccgcggcttccggattgaactgggagaaatcgaagcggttctcgtcaaacatccggatgtcgaggatgccgccgtagtcgtccgtgaagaccggccgggagataaacggctggccgcctaccttgtccgatctgccggcagcaccttggacacaggaaacatgcgccggtttgccgaagaaagcctgccggattacatgattccgtcagcttttgtccaaatgaatgaattgccgctgacaccgaatggaaagcttgaccgaaaagcgctccctgcgcctgacttccaaacggaggtcaccggccggggaccgagaacgccgcaggaagaaatgctgtgtgagctgttcgcagaggtgcttcatctgccgcgtgtcggtattgatgacagattctttgatttaggcggccattctttgcttgcggttcatttaatgggccgtattcgggaagcgatgggagccgagctgagtatcggaacattatttgaagctcctacggtggcaagccttgctgaaagacttgagtcaggaacgggcgcaagcgcgcttgatgttcttcttccgctcagaacggcaggagaagaaacaccgttgttctgtgtccatccggccggcggtctcagctggtgttatgccgggctgatgtcttctttagaggctgattatccgatatacggcttacaggcgagaggcatcggaaaaaaagaatcgcttccgcaaagcctagatgacatggcggcggattatattgaaaaaatccgcaccgtgcagccgaaagggccgtaccgtctgctcggctggtctctcggagggaatgtcattcaggccatggcgacacaattacagagccggggtgaagaggtttcgcttttggtgatgcttgacgcgtatccgaatcattttctgccgataaaaaatgcgcctgatgacgaggaagccgtcatcgcgctgctcgccctgggagggtacgacccggacagcctcggggatcagccgcttgattttgacgccgcgctgaccattcttcgccgtgagggaagcgcattagccagcctggacgagtcagtgatgatgaatctgaaagatacgtacattaattctgtcgggctgttaggaacatacaagccgaaaccgttccacggagatgtgctgttcttcagatcaacgattattccggagtggtttgacccgattgagccggatacttggaaaccgtatattacggggaaaatcgagcggtatgacttagactgccgccataaagatatgtgccagccgggcccgcttgccgacatcggcgcgattctggcagagaaattaaacggacggcgtacagtccggtaaagaaaggaaagagatgatatgacaaatccatttgaacgggaagacggctcataccatgtgctcgtcaatgctgaaggccagtactcactgtggccggcctatctggatgtgccggacggctgggaaacccgcctcacgaatgaaacccgccccgtttgtctcgaatatattgaaacaaactggcgtgatatgaggccggaaagcctgaaacaggccgaagccgctaaaatgtaataagaaaagcctgccgttatttcggcaggctttttatgcggacatcagccgttaagctgtgtatgatcacaaaatgtataagggtggccttcttcattcgtgcaccatgactgagacagaaaagccaaaaagaccgcggcccactggtctgcaaactggattaaaataccgccgtcgtgccacgttccgttatccttcttccagcgtgtatcaattgggtttccctgattcatatgaatattatgcatgccgtttgtcggcttgaacccgaaaatcttatcagcgcccggctccggcccgaatttagagccgtaaatatagacggtggctttttctgatttggctttttgcatgtacgtctcaataaagtcatttaagtcattatccggaccggtgacttcatgcgggaggggcaccatgttccggggatcaaacaatccgccgcggacataatccagcgccagctcacggctggtttcatcaattggggtatatccatacggaatgttgggcagcagggtgatcgcgcttgcatcaaaatgatcgcgtgccgcatacagaacctctgattcttttgaacttgacatgacattgatcgcacagcgatagcgcgtatcaggctcgcctagcacctcgacttgaaaatgcggagaatcatcatctgtttcccttttcatatctgacacagtgccttttaatacaccatagtgctgaacagccatatgaatcctcctttttcttccgggatatgaattgatattcgagacagggggccgtttttccttttatgagaaagaaaaaaggacagcccgctgatcaggctgtcctcttcatatctattaagcttttgcagccgaaccttgcattgctttttcagcaggcacgtagtcatagcctaagtctttggctaccgcttcatacgtgacatgtccgttagccgtatttaagcccgctttaagcgcagggctgtctgcaatggcttgtgccgcgcctttattggcgatttgaagcgcgtaaggaacggtcacattcgttaatgcgagcgtagacgtacgcggtacggcgcccggcatattggcgacagcgtagtgcacgacgccgtgtttttcgtaagtcggattatcgtgggttgtaatatgatcaacggtttccacaatgccgccctgatcgatggcaacatcaacaatgacggaacccggtttcatttgtttaaccatttcttccgtaacgagagtcggcgctttggctcccgggatgagcacggcgcagatcagaagatccgcttccgcgacggaatctgcaatatttacagggtttgacatcaatgttttaatctgatgcccgaaaatatcatcaagctgacgcagtcggtctgcgttcaaatcgatcattgtcacatcggcaccgagtccgacagccattttcgcggcatttgttccgacgccgccccctccgatgatcgtgacttttccgcgggatacacccggtacgccggctaataaaattccttttccgccctttggtttttcaagaaactgagccccgatttgcgcggccattctgccggccacttcggacatcggcgtaagcagcggaagggaacgtccgtccgttaccgtttcgtacgcaatagctgtcacgcctttttctgtaagcgctttagctaattccggctctgcagctaaatgaaggtaagtgaataagaccagaccttgacggaaatacgcatactcttcagccagcggttcttttaccttcatgaccatttccgcatcccatacttgctttctgtcctccagaatttccgcccctgctgatacataatcttcatttgtaaagccgcttccgagtcccgctccggattccacaagaacccgatggccgtttccgataagctgtgaaacgcctccaggtgttaatgccactcgattttcattgtttttgatttcctttggaaccccgataatcatgtctgtttcccccaatgtttgtgtgatgcttcaagtgtagcgcgatttttgcgaaaattctttgtttgaaacagaaaataaaaaaacacggatttgtgaaatttcacgaacccatgctgcgaagtttgatatcaaggtaaatcgtaaacttttcattcacattttttaagtcgatttctgcgatctggctgattcttttcagcctgtaattcaatgtattgacatggatgttaagcgctttagcggcggtgttgacattgctgtcggcatcaataaaatgttcgagcgtttttaccatatcggcttggtgctccctgtcatactgctcaagctttgacagggaatagttcatatagccgctgtgcttgcgtttttcatccaacacatccaggtactgataaatgccgagttccgaaaagctgaaaaggtgtttggtttctctcacaaaccgctctttcgcttttaatacggaaagcgcttcctgataggagcggtaaacataagaaatcgattcgtaaataccgccgaccgcaatcgacgcatcctcaattttatatcgttccttcagctgtttttgaatatgaagggcgaagtgctttacatctttaaaaggctgatcggttttcggcgcggctaataagattaattcatttgaatcaacagtcgccagcatgacatgaatctgctgtgtcgtttcctgcaaatattgcagctgctgttccgtcttttcagtcagctcatcatgtaaacggatgatcatgacgctgaacacggacggcagcgccattccgagcttatgaaacccttcggccatttcggcttcctgataaatatggccggtcagcattttccaaaaaaactcctggccccgctcttcgattttcgttttgcggatctgcaggtgcaaaagcttgttccgcaccgctttggctgccagctgaagtgtcttcagatcttcgtcattgagcttttttttgatctcaagcgcccaaataaatccgagaacctgactgtttttccagatggaaatcgccacgcggttgctcaggcccacctcgtcaatttctttcactttgatcggctggtccgtttttaaaagggccggaatggttccgtctttccagagtttgttgatgactttttccggcaccctccgcccgataatcgtcgacgtccgagccggatctgtacaatcgctgtgcgtgctgtatgcaagcagtttatgattaacgtcttctattgtaatggggcattgaagaacttcactgatatggtcggcaacatcttcaagcctgtcgaaactgtacttaaatggatcctttggattggtcatctgtatccctactttttcatagcttcatatcttgatcttaccatcttgcttttcagactgaaaggcatctttgcagggaaatggactaggacaatgagatcattcgatgaaaacgaaaataataagaaaatcatactattgtatttacaaaatgtgtaaatatgacgaaaaatccaatatatcataagactcattttgtaaaattaaaacagatttgtttgactgtgccgattggttgtttttataataatgacgttcaaaaaataagtgaattagcccatatttaggctgatgacacaggagggtataaggaatatgtctggattaattcgtgtcacacccgaagagctaagagcgatggctaagcaatatggcgttgaaagtcaggaagtcatgaatcaggttgaccgcctgaaccgcatgatttctgatttgaaaggcatgtgggaaggtgcttcaagtgaagcatttgcagatcaatatgagcagctgaaaccttcatttattaaaatgtctgaattgcttcaagatgtgaatcatcagctcgatcaaacggcaaatacgcttgagtctactgaccaagatatcgctaaccaaattcgcggataataagatgaatgaagaaacggagcgcctgattcaatcaagaagacggcgctctttctatgtaagggtgatatgaatatgtatatcgatattacaatagatttaacacattataacggcagcgtcttcgatctcagattgtcagattaccattctgtgaaaaaagtcattgatattgcccggcaggctcagcatgtatccgttccgccgcgtgaaggctattggatcagagtggtcaataaagaagcggttttttccggagaacaaaagctatctgactgcggcattacgaacggagaccgccttgaaattttatgaaaggacatggtggaatgacaggtcataacagatcttatttagaaacagaattagacgccgtccgggaagaaaccgaatcaggcttcacgttcaccttccagcgggaaaaaatcaagcttcttgacgggctggaagcaaacgtgattaaagatgctgatcctttttttcaaaaagaggtctcagtttcagaagacgaagtaaccatcacaatcaaacctccttcttcttatcaggctttccgctatataaaaggaaaagataaaaaaagcaggtggcaatttgcctaccgtctcgtccaagccgtgaaacagcataagctgaaacgtctcaatctgattgccgcccctgaaaatatcgtgtttgataaagcgctgacgccttactttcttcattacggcgtaaaggagagccttccgccttatgaggaagatagagaaagggtgttaaaagagctcaaagcctgtgcggcgcttgcagctgacggggcgtacaccttcgatgaatatttgaagtacaaggagacgcttcacttctctcctgaggtgaaaagcgtgctagaggcggagacgattgaagaactggaagaaaccattcaaaccgcaattgattccctcgaagaaagggacaagacatacataaaactgccgaaaaagaaatggaaaatccaaagatacgccggtctggcgcttgccgtcctccttgtgccgacacttctttactccttatacgttctgtttttcgcccagccaaagcaagaggcaattacggaaagcaaccgctattttttaaatcagcagtacagcaaagtcattgacacactcgccaaatacgatgcggaaagcctcccggaatctgtgcagtacgagcttgcttcttcttatgtggcagttgaaaatctgagggaagagcagcggaaaaacatcgggaatctggtcacgctgcaatcagacccgaagcatttcctttattggattgatatcggcagaggggaaaatgaagaagccatcaaaatcggccgcaatcttgagtacaacccgtacatctggctcggacttacaaaatataaacagcaattattagcggatgacagtatgaaagacgacgaaaagcagaaagaactggacgccgtggaaagcgagcttgcgaaggcgaaaaaagaggcggaggagcagcataaagaagcggaggaaaacggtgacaccgccgaagcttccgccggacaggatgaaagcaaacaagacaaagcgaaagataacaaagagaacgacaagaaagatgagaaaaaagatgaaaaaaaataacagcacacatcaaatggccgcaggtaacgatcaggctgtcaggaggttcgccatatgagtctgttatgggtcttttaccgagagcacgtacaaaagattcagctgtctgaactcccgccgtctcagccgattacgatcggtccggatatgaaagatacaatcacggtcggcactcttccgttacggcaaaacgccgcaaccctttatcgaaaagaaacagatcgttatgatgttttcctgggaaataactgtgccggcgaattgacaataggaaatgaaatgccctgccggattgaagaagagacgatgcggcttctgctcacccctgacaaagaagaatcctccgtttattttatcggcgggaaggatgagatcgttttctcatcagaaacagaggaagcggatatatacaaagagccgtcctccgctcaaacaggggctttttatctgcgaaagtcgggaggatgctggtctgtcatccctgatggccaggacgtttatgtgaacggaaaacttgcagaagctcctgaaaggctccgcacgggagatgagctgctgtggaattttctgcgtgtgaggctgacggaggacgaccttttagaaatcgttcatcacgaaaagcttcaaaccggtttaaccaaaacggtaaaaccaagcaccgaaatgaaaaagaaatacccgcaatatcgaagaacgccgcgtatggtctacgatcttccagaagaccgcgtttcattcagctttccctcgcaggaaagcgaacagaataaccgggggctgtggctcgtcattctgcctcctttggtcatgctgattgtaatgggggttgtcgccattatacagccgaggggcatattcatccttgtctctttggcgatgtttatgatgactctcattacgtccaccgtgcagtatttccgtgaaaaaaaccagcggaaaaaacgggaggaaaaacgggagcgtgtgtacaagcagtatttagaaagcaagcggaaagagcttcagacgctgtcggaaaaacagctgcaagtgctgacgcatcattttcccccgtttgaaaaaatgaaatatttaacttctgaaatcagcggccgcatttgggagaaatcgctggaaagcagggattttctgatgcttcggctcggaacgggcacggtcccggcaagctacgagatttcaatgagcggcggagaccttgcgaaccgtgatgtggatgacttgatggagcagtcgcagcacatgcagcgtgtgtataaagatatccgccatgcgcccgtgaccgttgatttacaagaagggccgatggggcttgtcgggaaacctcagatcgtcaaaaatgaaattcaccagctgatcggccagctcgcgttcttcaacagctaccatgatctgcgatttgtctttatctttcatgaggacgaatataaggaatgggaatggatgaagtggctgccgcaatttcagctgcctcatatgtacgcgaaaggatttatttacaatgaacagacccgcgatcaattgttatcgtccatttacgagctgctgcgggagcgggatttggaagaagataaagaaaagaagatcttccagccgcattttgtctttgtcatcacaaatcagcagctgatcgcagagcacgtcattttagaatacatcgaaggccggcatgagcatctcggcatctcggcaatcatcgccgcggaaacgaaggaaagcctggcggaaaacattcacaccctcgtccgctacattaatgaagatgagggagacattctcattcagcagaaaaaagcggtgcagatcccgtttaagctggacaggcacgaacggacaaacaacgagcggttttcccggacgcttcggacattgcaccatcaggtcggaatgacgaattccattcctgaaacggtctcatttctggagctgtttcatgcgaaggaagtaaaagaaatcggcatcaggcagaagtgggagacaagtgagtctgcaaaatcgctggctgttccgatcggctataaaggaaaagacgacatcgtctatttaaacctgcatgaaaaagcgcacgggccgcacggattgctggcgggaacgaccggctccgggaaaagtgaatttctgcaaacgtacatcctgtcattggccgttcactttcacccgcatgaagcggcgtttttgctgattgactataagggcggaggaatggcccagccgttccgcaagatgccgcaccttctcggaaccatcacgaatattgaaggaagcagaaacttcagtatcagggcgcttgcatccattaagagcgagctgaaaaaacggcagcgtctgtttgatcaatatcgcgtcaatcacatcaatgactatacaaagctgtataaacagggagaaacggagattccgatgccgcacctgtttttgatttcagatgaattcgccgagctgaaaagcgaagagcctgactttatcagggagcttgtcagcgcggcccgcatcggacggagccttggtgtgcatttaattctcgccacgcaaaagccgggcggcatcattgacgaccaaatatggagcaactcacgctttaaggtcgcgctgaaagtgcaggatgcaagtgacagtaaagaaatcctgaaaaacagtgatgcggcgaatattacggtcaccggacgcggctacttgcaagtcggaaataacgaagtgtatgagcagttccagtctgcctggagcggcgccccttacatggaagatgtatacggcaccgaggatgacattgccatcgttaccgacaccggcttaatcccgctgtctgaggtggatgcggatgatgcggcgaaaaaagacgccccggcagaaatagaagccgtagtcgaagaaatcgagcggattcaaaatgaaatgggcattgaaaagctgccgagcccgtggcttccgccgcttgccgaacgtatcccgcgcacgctttaccctgcgcaggaaaaagaccgcttcttcatcgcctgcgtggatgagcctgatcagcaaagacaggcgcctctcgcttatacgatgatggatgacggtaacatcggcattttcggctcatccggctacggcaagtcagtggctgccatcaccttcctgatgaacttcgcggaaggatacacgccggaagagcttcatatgtacatctttgatttcggaaacggcacgcttctgccattggcaaagcttccgcacaccgcagactatttcttaatggatcaaatgagaaagatcgaaaaattcatgatccgcatcaaggaagaaatcgagcggcggaaacggctgttcagagaaaaagaagtcagccatatcaaaatgtacaattcgctcagtgaagaagagctgccgtttatatttatcacaattgacaatttcgacatcgtaaaagatgaaatgcatgaattagaaacggaatttatccagatttcacgcgacgggcaaagcttaggcatttacttcctgctgactgcaacgagggtaaacgccgtccgccagtcgctgttaaacaacataaaaacgaaagtcgtccattatttaatggatcagtcagaaggatactccatttacgggcgtccgccgttcagtctcgaaccgatcccgggccgcgtgatgatccaaaaagaagaactgtttttcgcgcaaatgtttcttccggctgaagcggaaaatgacctcgagatgttccaggcgctgaaagccgatgtcaaagcattagctgagcgccacgccggaacagccggcccagacccgattccgatgcttccggataggctgacggccggcgaattttcactccgtctcggcccggatcaagaaccgttccgcattcctgtcgggcttcatgaggaaaaggtcagccctgtgtactttgatctgggcaaaaataagcattgccttatcttaggccagacacagcggggaaaaacaaatatcctgaaagtgatgctgaatcacctgctgcgtgaaggtacggaacaggtcgggctgtttgactcgattgaccgcggactgtcgcagtatgcgcaggaaacaaaagtcagctatctggacacaaaagaagacgtccggcagtggatcgaaacggcagaagctattttcacggagcgcgaagctcagtatgcgcaggccgtcaaaaatggcgatgtgcacaaactcagtttctctccggtcgtgttaatggccgacggcattacaagattccagcagacgatcgacaccgccattcaggacaagctggcgatgtttatgaaatcttacgcgcatgtgggcttcagttttatcccggcgggcaatcacagcgaattctcaaaaggctatgattccttaacgacggaaatgaaacagatccgccacgcgatgctgcttgtgaaaaaatccgaacaaaatgtcattccgctgccttaccaaaggcaggaaccggacattcagccgggcttcggctatttggttgaaaacgggaaagagcaaaaaatccaaatacctttatgttcagcggaaagggaggccgtcagatgactgaacaacgaaaaagcctgatcaaattaatagccgcggtcgtcatcattctgctgctgccggtgctgtttttccggtttatcggcgatgacccgggaaaacaaaaaatcaacgccacccgccaaatcgcagtcgtgaatgaagacatgggcttacaaacagatgaaaatgaggaagaggaatccgtccatttcggcaaagaagtagcggccgctctcggcggccgtccggattattcatggacggttgtcaacaggagcgcggctgaaaacggtctggcggctaagaagtatgacgccgtcgtttacattccatccgatttttcaaaagacatcttaagctatgacaaggagcgtccgcaaaaagccacgctgacattcaatattcaaagcaacctgaacgccgtcaacaaagaaaaggtgcagcgtgagctagaagacgcccaaaaatcaatgaataaaaaaatgtcggcattatattggaatttcgtctcgcaaaaagtgaacaatgtccgaggcgattttgacaagatcgtcaataaagaatcagagtttcaaaacgtcatgtacaacttttacaagccgagctccaatgacttggcaggtgaaatcaaacggcaaaaagacctgattgacgaactgaaaaaatcaatgaatgaagcgcagggcgcggcaaaagaaaaattgacttcggcagatgaagccaaaaccacgcttaaagactttgccgacacggtcgagcgctataaacaatatcaagaaaatcagaaaaaactgctgatggccgcgcaggaacaaaaccaaaagcaaatcacaaccggactgaatgccattaaagcacagcaggccgccaaccagttcagcacgatgatgagcgggctgtcttcaggcataaaccgggcgcagacacagcttgaccagacgggatcggctcttcttgccgctcaacaggtgagagaagcgcaggttcctgatcaggaacacgggatggcgaatattcaatccaatttactggacaattatttgactcaatataaagctcaagcaagatttgaaacactgaacagtatccaaacccttatgaaaagggatcggccggcattaaccgttccggaaaaggacccgggtgatgacggctcggatgaaccgaaagaagaagaaaaaccggaagaagaaaaacccggcgatctgaaaatggaccttgacgatcagcgtgacgaattaaaacgcatctccgctgaaatcaatcacatttctgacggattaaaagaaccggaaaaagaaaaaccggaaccggaaaacccgggccaaggcgatgacggtgaaaactccggcgataccgatccggataacggaacgaatcccggagaagacggaaaaacggaagacggcacaaaagaagagcagcctgcttccgataacacaggcgatcaggagccaaaaaccgtccaggccgcgacagccgctaaaaacgtcactccgcctgctgatgagccggcggacgacccgaacgattctgaaggggacggcggcacggacatatctgaggcgaaagaaaggctgaaccaagccgcagagcgcattcagcaaattgaaaaagagctggaagagaaacagcagactcataatgaagaactgaaaaaacgtctcgatgctcttgatgaagaaatccaaggccttcaagaccagattgatgacgtcaaaaaacgtgcaaagaaaaagctagaggaattgaaagaaacgagaaaacaagacttcaataccgtttacagattgattgtaagaacagaacagaacattttgaactacccgtcattggatagcggccgcaaatctgctcttgaacagatatttgccgctgacattaatacaaaaaagatatccgatttaatgagttactataatgatttatccctgtatgaggccacactctatcactctcttgacgcgggctcgctgcctgatgtgaaaaacagggtgctgaaagcccagcaaggcgaagtccaaaccgttctcgccatcaaaccggaagaaacagcaagctgggaaaatctaaaaaacaacaaaatgcagacagatgaagacatcagcaatttcattaaaggcatgaccgaattctcggataactacagctcgtatatcagagatgaacaagccggagtgctcgatgagctcgccagcatttcagacagcgcggcgaaagcatccgatcagctggctgaaggcgccgtgcaggaagcggccgcgttcagcggagacggattaaccggaacgatggcgctcggcgctcaggataccgtcggccgcgaagtcctgcaaatgtctgacacgatgggccatctgtcagaacgccagtccggcatcatcagctataccgacaatatgcagcaaagcgtaaatgatgtccagcataaagcggacaccctgaacagcaactggggcaaaaacgtcgattccacgaaattgatcagaaatgacgtgtacggcattttagggaacgcgctcgttgacggacaggaaaacggctatgtttacgattatctcgccaacccgcttaaaatcagcggagaggtgccggaagaccgggttcagaatgttccgccggtcgtcattttggtgatcgtcctgatcagcagtcttctgatcggctatttcagctcgtattatcagcaggcgccgcttcttgtcaaaggcgcgctctttgggattttaaacattatggtcggattgatgatcagtctgttcggtctgaatatctactcgcttccggacgatcagacgattaaatggtcagtctttacgattctcttgcttgcggcgagttcagcttttatccgggcagcctttgtcttcagctcaatcaccggatggattgcatcatccgcgctcattctcttttatgtggcgcctttgatcgacctgattatgccgaacttcacctttgacagtccggtttcgaaagtctatatcgatattcaatacggaacgggccatctgtttgcgatgggggtaacggttcttgcgatcattacgctgattgcggcggcgcttccgctcgtcattcggctgtttgcggaaaaaacggaggaaagtgatcagtcttatgaggcgtaacacgttcatggaaaaaggattgctgctgtttgctctctcctttttccttttccttccccaagccgcagccgcgaatgaggaaaatactgatgtcaagccgaatgaatatgaaaagaaagacattgaaattcgtacggattacctgcacgacgatgcctactccgaggaaaaaacggcgcttccgaaagaacagaaggatattacctttgatcagccggccgaaaacccggatgacaaactgatatcaaagttgtttacatcgtcagacacggagccgaatacgatcaaagcgcaatcgaaaaaactgggtatcacatttgccgagcctgcggtgcggcatacctcggcagatatggaaacggaggagaaaaagacttcttatctgctgcctgtcatttatgccgtcttgatcctcctcgggattgcggcgatgatctatttgatcccgaaagtcacggcgcaggaaaaggcaaagcggtaaacggatcgcttgtgtttgcgggaagacagcccgtaaaataagaaaaaaaggaggggtttcatgcagttttttcttataacaggcgcgtcaaaaggcttgggccgggcgctgacggaacaggcgctgcaagaaggagccgaagtcgccgcgctttcaagaacgataagcggggaaaagcgtgaggggctgacagaatacagtgttgatttaaccgatctggcagatacagagcggcagatgaaggcgattcttgatcaagcagaggagaaggggtactccgccgtcacactgatcaacaatgccggaatggtggaaccgatcaagcgggcgaaagaggcttccgccgaagaattgaaccgccattacacccttaatctgacggcgcccgttttgctcagccaaatgttcacaaagcgtttcgaagcgttcagcggcagcaaaacaattgtcaacatcacatcgggcgcggcgaaaaatccttataaaggctggagcgcgtattgcagctcaaaagcggggcttgatatgtttacgagaacattcgggtttgaacaggaagatgaagagctgccggtccgcatgatctcattctcgccgggagtgatggatacagacatgcaggccgtcatccgttcttcgtcaaaagaagatttccatgacatcgagcggttccgcaatctgaaagaaacgaaaaacctcagaagcccggaatacatcgccggcgtcattcactcactgatcgcgggcgagccggaaaacggacggatatacgatatcaaagaatttttgtagagcagcttttacgctgctcttttttgtttgtacaatcacttcggggtccggcggcatatgatgaatgaaacaacgtataaggggtataagaaatgtatcagatgaattgagtttcttctcgatttatgttaggattctaaaaatataaataaggaggggtttccatgagaaatgtaacgttaatggatgtcttcacccatccaatcgcacaaaagtatttacagcgttccggtgtcgcccatgcgatcgcctgcgcgtttcatgcataccgtcttgccgtaaaagcaggtgtcagcccggatcttgcggcgaaagcggctttactgcatgacgtcggccattatgaatggtacacagacggcaaatgggattatgaaaagtacagaagaaacgatatccatgccattaaaggcgcggaacgggcgcataagctgctcatccggctcggtgaagaaccgaaagcggcgaaggacattgcgctggcgattctgcttcacaccgattcctatctgcccgaaggcgaactggacaagaatacgctccagcaaatcgtgaaacaagcggatgaactcgatgaagaacccggcgggcatcaccattaccgccaaatggatcacacggccgcgctcaaacaaatccaaaagcttgatcagttaattgaccaagcccaatatcccataagaagctcagtctaggccactcatgcggccttttccgcttacataactccgcatgctcactaacaccttttccgctccgatagacgtactgtgtcaaagcctttgtccgctgcatatgctgaaggaaaacatagtaaaggggatcagcgaaaatggcccatcaaggaagcccgcaaatcgtctcgttagtggacccttacgtttatcagaccatccataaacttatcggctcaaggtttatcattcaaaccgtcagacgcattgtcagaggacggctgattgatgccactccggatcacatcgccattgaagaaacgcatgaccgtgtattttatatcagaaaccgccatgtggtttccgtcatgcctgattataccgaacgcgtgtaacagcccgaataaggcgcaaaccggaggcggccctatagaaccccggtgcgtcttcttttttgagatacatagatgcacggcggctttttttggtacaatcacagtacaagttcacatgacaataggaggaaaccgcttgttgaaatcaaaggtccatttttggacgctgcaaattttgctcgttttgctcattatttacgtatcaacgaaagtttcgtttatttttcagccgtttttcggttttatcaccactctgttttttccgattttgatctcgggcattttgtttttcatttttaatccgatcgtacgcctgcttgagaaaaaaatcccccggacattggcgatcctgctcatttatctcgttttcatcggcctgattgcctttatgttcaccgccatcggaccgattgtggcttcccaggtcacggggctgattaacaatttccctgattacattcatcagattcaagtcttgacggcgcaattatcccattccaaatggtttacgtggatgatgacgcaggattatgtgtcgatagaaaaaatccagcagtctctgacgggatttttacaaagccttccgcaaaatattacggcaagcctgtcggccgtgttcggcgtcgttacgaatatcacgcttgtcgtgatcaccgttccgttcattttgttttatatgctgaaggacggccggcggtttccgctcttggcggttaaaatcctgcctacttcctaccgggcggaaggtcgcaaaatatttaatgacttatatgtcacattggccgcctatttccaaggccagctgctgatttgtctctttgtcggaacggcatgctttatcggatattggatcatcggcctgcagtatgcgttaattctcgggatggtgatcgccgtcaccaatatcattccgtacctggggccgtttctcggggcggcgcccgcggtgattatcgcgtttatggattcgccggctaaggcgctgtttgccgttattgttgtcgttgtcgtccagcagcttgacgggaacctgctttctccgcttgtcatcgggaaacggctgaatacccacccgctcaccattattcttctgcttatcggagcgggcagtttcggcggcattctcgcaatgattctggccgtgccggtttacgcggttttaaaagctttcgtcttaaatatcgtccggcttatcaaacttcgtcagcggtcaaagctagaagacagccgcaagccgaaataaaaacgggcacaactcccgatgcagcgcataaaatgctgtaaagaaaagcggaggtgcgggtatgcctgcaattgtgggaccgatttatattatgagtttagccggagacgctgcggcgagcttcggtgacgtgtttgccatttctcccaaagccgttgaccactcaggcgcgggggcaggggcgtttcattccggagattttgtcaaagtcactaataaattcagcacaacgcgctttgaagacatcgatgtgtttgacgaacctgattggtttaacgcgtgacagcctccttttaggaggctgtcgcttttttgtagtataatagaatcagtctttataaaaggggaattttttatgaaaatcagaaaagcgaatattaccgtgcagtccggaatgatcggtgatgtatatctgcatgaaaataaaaaagaacagcatacccttgtagccgttccggaacttgagtggagcacgatcatttcctatgaagaagagaaaaaggcgctggcgcagcggcttttccaatcattcagcaaactgattgaagaagaacccgccggagaactcgccggcaagatctcccattgggtggctgaaatgtaacgaagcggtttactgcgtcccgtccggggcgataattgtaaaacaagctgaggagggacaggccgatgagcgacaaaacggttgacctttatttacagcaggggatgtacggccctctgcagacaaaaccggatgaacgccatttatttttaggctcgctgcgtgaaagagtcatcattgccctaacgaaggggcaggtgctgcaaaagcagccgtatgaagaagtgaaaaaggcgctgaaaagccgaaaagacgcggtgctctatataaacggaaggctcccgtatcatgcttattcaccatatatgatgcttgccgcacttgccggtgtccgaagctccgtcatatcggatcttcaattcgaaacgccgctcggcctggtttttgccgccgattatgccgtgaaccttgacggcatttacgtacaggatgacatttttcagcgctcactcctgaaatcttaaaagggcaaaacaccgtttgtcattttacaatgccaattcacttacaagtggagataggatataatggttttcatatgaatggcggggaggccggctatgaaaaaagcatttatatgcattgattatacgaatgattttgcagcagagaacggggcattaacctgcggagaacccgcgagacagattgaagatacgattgtcagtttgacgcaagcatttatagaaaacggtgattacgttgtctttgcggtagattcgcatgatgcagacgatgactttcatcccgagacacgcctttttcctccgcataatatcaacggcacggagggcaaagagctgtacggaaggctatcgcctctttatgagaaacataaacacgcaaaaaacgtaaattatatggaaaaaacgagatattctgcttttgcgggaacggatttagagctgaaactgcgggaacggcagatcactgagctgcatcttgcgggcctgtgcacggacatctgcgttcttcacacggcggttgacgcctacaacaagggctttcagattgtcattcatcaaaacgctgtggccagctttaatccggaagggcatgaatgggccctgtcccattttaagaacagcatcggagcgcaagtggcagagtaaggaaggggaaaataattttggtggagcatggttttaaagacgacagtttgtctttacatacagatctttatcaaattaatatggccgaaacgtattggagagacggcattcatgagaaaaaagcgatttttgagctttttttcagaaagcttccctttgaaaacggctatgcggtatttgcgggcttagaaaaagcaatcgaatacttggagaacttcaaatttaccgacagcgatctgaattatttaaaaacggaattgcactatgctgatgatttcattgagtatttacgggatctttcttttaccggatctctttacagcatgaaagaaggcgagctcgtttttaacaacgaaccgattatgcgggtcgaagcgcccctgatcgaagcccagctgattgagacggctctgcttaacattgtgaattaccaaacattaatcgccacgaaagcggcccgcattaaaggcgttgtcggtgacgaagacgccctcgaattcggaacgcggcgtgcccatgaaatggatgcggctatgtggggagcgagagcggctctgatcggcggcttcagcgcgacgagtaatgtaagagccggaaagcgttttaatatacccgtatccggcacgcacgctcatgcgctcgtacaagcgtaccgcgatgaatatacggcatttaagaaatatgcggagacccacaaagactgcgtgtttctcgtagatacgtacgatacgatccgttcgggcatgccgaatgcgattaaagtcgcaaaggaattcggcgaccggatcaacttcatcggcatccggctggatagcggggacttggcgtacctttcaaaaaaagcgcgtgaaatgcttgatgaagcgggtttcacagacgcaaaggtcattgcttcaagcgatcttgacgagcacacgatattaaatctgaaatcgcaaggagcgaaaatcgatacgtggggcatcggcacgaagctgattaccgcatacgatcagccggccctcggcgcggtttacaagcttgtcgccattgaagaggacggcaaactgactgacaccattaaaatttcgtcaaaccctgaaaaagtgacaacgccgggaagaaagagagtataccggattatcaacaagctgaatcaccactcggaaggtgattatatcgcgctttatgacgagcgggtaaatgatcagaaacgcttaaaaatgttccatcccgtccacacgttcgtcagcaaattcgtcactgatttctatgcgaaagacttgcatgagccgatttttgaaaacggcgttttatgctatgataatcccgaaattaccgacatccagcaatacgtgcaggataacctcaaacttctgtgggaggaatacaaacggatcagcaagccggaagaatatccggtcgatttaagcgaagactgctggagcaacaagatgcagcggattcatgaaatcaaaagcgagctgaaacgggaacttgaatagaagacaaagcggcctttcctttctctggaaaggcctttttgttgtgataatatttttcacatttagacaaatttcgtcaagttatttgatatacttatgttcgaaggccgcatctaagggggtaaatgaatgaaggtgtttgttgcgagacagcctatcttcaacagaaacgaacaggttgttgcttatgaacttctttaccgggagagcgaagagaaccgttattcggccgctgatggagataaagctacgacggatctcattattaacagctttatcaacatcggaatcgaaaagctgactgaggggaaacgctgctttgtgaattttacagaaagcctgatgttttcagatctccctacctcctttgatcctgaccagcttattatcgaaattcttgaggacataccgatcactccggcactcatctcaagatgcagacagctgaagaaattaggatatacattagcacttgatgatttttacgccatcaatccggaaaatgaagagttagtggaacagctgatgaaatatattgatattttaaaaatcgactttttgcaatcctcgcgtctggagcgcaaaaaaatcattcagacgtacagctgtaaaagtctgatttatttagcggagaaagtggagacgagaaaagattataaacaggcggccatagacggctttcacctgtttcaaggatattttttcagtgaaccgcgtgtcatcagcggaaatgatctgacgtttcattttcattcttactaccagcttttaagcgaattaaacaatgaccagcccaatatacagcgcgtgacggaatacatagagcgggacgtcagcttatcgtatcagattctgcgttttttaaacggatcgcaaacaaggctgaaaaaaaagatagacagcatccagcaggccatcatgatgcttgggctgaatgagattaagcgcttgatttacattctttcattcagagatttaacggcgaaaagccactcaagccaaaaagaaatcattaagatttccttaatcagggccaaactgtgcgaactgctggcgaaaagaaccggaaggccccagccctcttcttacatgctgatcggcatgttttcgctcatcgatacgcttctccacagggagctggaggatatcatcaaagaactgcctttaatcgatgaagtcggacaggcgctgctcggttatgaaaacgattattataagatgctcgcgttcgtcaaagccattgaatgcaacaactgggactgtgacgagtggggaaaagaactgaacaaagaagaagcgtatgaatgttacttacaggcgatcgaatggtgccggcagctgatcgtggattgagccgctttaagccgaccacctgagggcgatggtaaaccggctttgctctctgatcagactgacacggatgccgtcgggattatacgtcacgtcaaagtcatttttgatgccggtctgcttaatgagccgcttgaccgctgcggtgtcagatgattgcgctgcggtgaggatacggcgcgcaagctcttttgacgccgacagccgcgcaaggagcaggcgcgcttcctccagcatgcccgcagcctcttttgcggacgctgtcaaaatatctgcgtgaaccggggcactgggcgcaggatgccggtatggcgcggcgaaaacaggaaagcatggatacacataatgcatacggcggcctccttcctgagaaaacattcgttatacatgagtataggcggcatgataacgagttatgacatgcaaaagaccacaatgcgggggttgcggtcttttcggtgtttgtcggtggttatgcgacgctgttcgcccattctgttttgaaattgcgacggcagggactatagtccttgccggtttgtcggaaaaccgttaaaaaaacagcagaaccgccagattggtctgcttcatcctaaacgtctgcctttctggtagttatatagtcctgttcgctaaatgctccattcgggactataggattaccccggtttgcggtgtcacgcagatacttttacacatacttttcggtgaaaaatcccgcaaaaacgtttacactattagtaacagatcaaatacctaggactcgttcaccatacacaattcattgatctttcaaaaaaaggagtgtggaaacggtggaaaacaaattagaagaagtaaagcaattattattccgacttgaaaatgatatcagagaaacaaccgactcattacgaaacattaacaaaagcattgatcagctcgataaattctcatatgcaatgaaaatttcttaaaaagacttggaaacaagtcttttttttgtgcattttttatccatttcgtggataaagtattatacgattgttaaaaaacgaaaaacctgctgtctttcatcacctgcatttagtaaaatagaatgggagggtgaagacaattattgagcaaatgtgtttagatgccgaaacgattaaagagaagatgaaggaaattgtggagcacaatatatgcaatactaacttgaaaatgtaccttctaaaatttattgcatcaaaagattcattcggatttgctgaattggcatatcaacattacaaagcgttcaatggcagagacacagaggcaattttaaagttagccgtaggcatagaattattagtcctgtcatacgacatttatgatgatttagaagataatgataatctgaaaatggaatggatgaaaacaggtctccccattacgctgaatactgtaacggccctctatacattaagtatacaggttatgaatcagattagtgaaaatccgtattttcttaagcaaatattaaactttgctttgaattcaattgagggccagcaagatgatattttgaatgcaccgcaaactgaagaagagtgcttgaaaatgattaagaataaatctggctctttaactgcaatgccttgcgttatgggcgcgatgctggctacaggaaagttaaatccaatcgttcaatcatattcatatgaactcggaataatatcccagattgataatgattatcaaggtttgttttacttgaataatgattttgttcaacgcaaaaatacacttgcttatttatacttaaaaaagagattcaataaagcttctgaagaaatcttacaatggtatgaaaacccggagttattcaaaaccttaaagactcgagacataaaaaagaaattaattgaagcaggtgtaacccaatacttattggttttgaaacatttgtcgttaaaaaaaataaaaagtaagatatttgaattggaaatagaaagaaataaaacggaaactttattaaatgcgattgttaatttagaggaggatgaaaaataatgcaggaaattgtaggatacttaaccaaaaatccagaagttttaaataaagtgattgaaggcaatgctagtctgattggagttagccaggatcaaacagattgtgttataaatgcgtttaagggtatagatgttatttctttcggcggtgattggaaatattgaggatgatataaatgaagtccaagtacaataagatttcagttgtcttaattctgcttacattggtatatgtcatttatctgacttatataagcacaaataatcttttagtcggcgccacaatttctgaaaataaacagggcgaaattaaaataaaagatgtagaagattttacaatggcatattacgccggagtgcaaaagggagatatagtaaagaatattaaccaccaaaatgtaaagtcaattaatattcaaatgaataagctgaaaaatgtaaactcgatggtcgttgatagaaacggtcatgatattgagattaagctcaatttatttaatgataggaacttcagtacttacttaataccgataattttttatgtagtatgtttattttgctgtttcttcatcatcaaaataaatgaagaaaaaaacttgaaatctgctttggtgctaattgtatttcttttgtctgcttcaatcgcatatattagtgctggaggatcggcaaaaggcgatttgcttagcagatgcatcatgttgttaacattaataactgtacctttaaattatcttctgtttctttatcattactttaaagaattaggtacagtgcttttcagcaaaaaagttttcgctttgtatttatttccaactataaatatattatttgaattattccggtcgcgattatcttttggtgattttattccaaaatttaatttgatttcgttttttcttctttttttgattgtagcatattactttattgttattttgagaagaaacaaagatactgatcaggcacatattataaaggtgcttgtggttataaatatattggcattttcgccttttttatgtctgtatcttataccgtatgtattttttaatgattattatgtctcttctttcttaacagcttcatttatgctgctgatacctttttcacttgtatatcaattcatgtcgaataaaatatataacgttgattttatcttaagtaagttaaaatattacggctttttagcgttaaccccaactataattctggttacgacaatagagttattacgtgagccggaagaaaatttttacaatctcaaactgacatttttaatttatattttaatgttagctgttttttattataaagaaatactcgatttccggtttaaattaaaaagggtttctgaaaggttcaattaccaagacagtatttataagtttacccaattaatcagaaactcgtcttctttaactcaggtttttggagaattaaaaaccaccattctcgaagtaactcttacaagtaaagtgtatatatttgaagttacgtatgatgggaatgtaaaggcatttgacgaaagagattcaagtttgatagatgattatcaagtgcttttaaatagtgttactggtgaaataggaaaaataacggagtttaatcaaggtttcgcaatgaaagtaggagaacggggagatagatcattcgttgttctctgtttgtctaagatgaatacgccccgtttatcacgtgaagaaatttcttggttaaaaacattatctttttacgttaatgtttcaatagaaaacgtgatgaaaatcgaagaacttatgaatcatctcgaagatttaaagaaacaagagacaaacccggtctggctcaaaaagctgatgtttacgatcgaggaaaagcagcgttcggatttggcccgtgatctgcatgattcagtgctgcaggacttgatttctttgaagcgccagtgtgagctgtttctggccgattttaagaaagaagagccttgccagttagaggtgcaggacaagcttcatcagatgaatgagcagatgtcggatgtcattttgatgacccgggagacgtgccatgagctgcgtcctcagctgctgtatgatttgggtctggtcaaggcggtatccaagcttgccgcgcagcagcaggagcgtgcgccgtttcatatccgtctgaatacgggccggtttacggcggcgctggatttggatacgcagctgaatttgtaccgcattattcaggaatttctttcgaacgccatgaagcattcacaggcgaatgaggtgctgattatgctgatcagcattcaaaataaagtgattctgcattatgaagacgacggtgtcggctgcaatcaggaaaaaggcggcggccagtcgatgagcatgggtctttcgggtattaaggagcgcgtccgtgcgcttgacggacggatgaaaatcgacacaagtgaaggaaacggttttaaagtagatattgaaatggaattgtaaccaatttatcaccaaatcgacttggcagaagccaagtctttttaataaaatggaaatgagtgagtaaaagggaggaaaccatgaaaaagatactagtgattgatgaacatccagctgtcatggagggcaccaagacgattctggaaacggacacgaatctttctgtcgattgcctcagtcctgatgccagtgaacaattcgttctccggcatgatttttcagcttacgatctcatattaatggatttaaatctgggtgatgacatcagcggcatagagctttctaagaaaatcttaaaagagaatcctctctgtaaaatcattgtctacacaggctatgaggttgaagattattttgaagaatccatccgcgcgggcctgcatggcgccatcagcaaaaccgaatctaaagagaaaatcatgcaatacatatatcacgtgctcaacggacagattttagttgatttctcctatttcaaacagctgatgacccagcaaaaaacaaaaacgtcttcttcccctcaaagtgagcaggatcggttaaccccgagagagcgccatattctccaagaggtcgaaaaaggtttgaccaatcaggaaatcgcagatgcacttcacttaagcaagcggtcaattgaatacagcctgacatccatttttaacaagctgaatgtcggctcccgaactgaagcggtgctgatcgccaagtcagataacgtactataaatcttgaagggagaatgacctatgaatctgaacaatacattgctcggcgcactcggtattgaaatcactgaaaacacaccggagagatgcgtggcggtgatgccggtggataagaggacggtgcagcctttcggatatctgcatgggggcgcgtcagcagcgctggcggagactgttgcaagtgtcggggcccagcattttatcgaccggtcgaaccaggcgtgtgtcgggcttgagattaatgccaatcatttaaaatccgtgaaagagggcgggacggtcacggcgattgcgaaacccgttcacacaggcagggcaaccattgtgtacgggattaacattttcgatgaacgggaaaggctgatctgtgtttcccgctgcacgctggctgttataacaaaataaacaaacagccggaaccctgaatcgtccggctgtttgtttttataaatatgaatcttctttacgtttgatcacaaagtttctgatccctttgtaatcatcctgaacgcttcttttatcaagcgccgctcccgaattgtacgcggccctgcatatgaggtgcgctccgaccggcgccgtcagcaggataaaaatgatgccgagcagtatttttacagaaatttctccggtcagcatccacaagtagcctaacaccccgagcaataccaaattaacgccgagtgtcgagccttttgaagaggcgtgggcgcgcgtatacacatcaggaagcctgagtgtgccgaaagatgcgaccaggcagatcagcgatcccatcagaatacaaacggcgacggcccatttaacgatttcgatcattttcgataatctctcctttctccaaaaacttagcaaaggcaatcgtgccgataaacgataaaatgccgagcagcagaatgatgtccaaaaaggccgatgtgtttaagagaatggatacaagcgcggtcatggcaatcagattaatgccgatcccatcaagcgcgacgacccggtccggtatcgtaggcccttttatgacgcgaatgacgtacagaagagtcgaaaccgccataatgccgagtgataattgcagaataaacgtaaacatcagcggctcacctcctgaatggctttctcaaaagagacgcggatgtcatggatcgctttctccgcatcttcaatgtccatggcgtgtatatagagaatcgaccggtcatcggagatatccatcacgagcgtacccggtgttaaagtgattaacagcgagagcagcgtgatctcccaatcctccgtcaattccgtcttaaacgcgaaaatgcccgggcggatgttcagtttcggcgatataacggttttcagcacgctgacattggccaaatataattcctttataaagatcagcgccagtttgatgactgaccatattttccaaatataaaacggccgcgagaagaagcgccggaaaaaaaacagcgccgccaagcccgcgataaatccggtcataaaacccgccgcgatgaggctgtttgtgagaaacatccagcaaacagcgagaagaacatttaataatagttgaaaagccatgccatctactccttcaaaacagcttcaatgtatttttccggattcagcagattctcagccgtctgattgacatacggtgaaacccattcggttccgagcccgaacagaagcgacaaaaggagaaaagcggctgccggataaagaagtccttttgcggaccgtccgcctgcgccggggatttctttttcttccccccaaaaagccgtcgtaaaaaccttcagcacggaatagagcacaagcaggctggataagagaatcaatacggaaaacaatgtttcccccttatcgaacccgccttccgcgatcttcagcttgcccacaaatccgctgaacggcgggatgccggccagagatatggctgaaataaagaacatccatcctaaaaggggataacgggtgatcagtccgcccattttatgcaggctggcagtgcccgtcaatgcgataagcgtgccggcgagcatgaacagcgctcctttaatcagcatatcgtgaatcaagtaataaaccgctccttgaatggaggccggcgtgttcatggcaatgccgaacaaaatcacgccgacggctgtaataatattgtagatgacgattttcatgacatccgaaaaggcgatagatccgattacgccgaataacaccgtcagcatcgcaagccacatcatcaattggtgggtaaagcccgtatcgtgaataaagatcagggtgaatactcttaaaatggcgtacaggccgactttcgtcaaaagagacccgaataaggccgaaatcgcagccggcggggcgtaataagagcccggcatccagaaatacagcgggaatatcccgccctttaaaccgaaaacgacgagaagaaggacgccgatgacggttatcagcccggtctggcccgattcacttatttttacgcttagatcagccatattcagcgtgcccgtcaccgcatataagtaaccgacgccgatgacaaaaaacgcggatgatacaatgttaaacacgatatacttcaatgattctcttaattgaattttcgttccgccaagcacgatcagcatgtaggacgcgataagcagaagctcaaaaaagacgtacatgttgaacaggtcacccgtcaaaaacgctccgcttacgccggccagaagaaactgcacccctgaataatagaaagcgcgctcccttttttctccgatggagcggaaggagtacaggatgacgagcagcccgattatggcggttgtcaaaacaagcagtgcggcaagctgatccgcggcgagcacaatgccgtacggcgctttccatccgccgagtgtcagcgtctgaatcccgtgtgtgaaaacggtctgaacgagagcggcgctgatgacgatggagacacaggaagcggcagtgctgaatatccgcatcagcatcacgtgcctgttcataaaaatcagcagcactgcggcaagcagcggcaccagaataggcaatatcacaaagttattcatgttgatcatttcccctcattcgatccatatcgtccgttttcagttcctgataggcgcgaaacgccatcacaagcaggaaggacgtgacgccgaacgaaataacgatcgccgtcagtatgagtgcctgcggcagcggatcgacaaacgacgtgctttttccgcccagtatgggaggagcgccttttttcagtccgcccatggtcaggagcagcaaatggacgccgtggcttaatagcgcggtgccgataatcacgcgcagcagacttttagaaagcagcaggtaggttgccgccataaacaaaataccggcaatgacagacattaagatttccattattcttcctctccaatcgtttgaataatggtcatcgtcacgccgacaacaacgagatacacacctaaatcaaacaaagtggccgtcgcaagctccgtattcccaagcaccgggagatgaaaatggccgaatgtatgggtgagaaagggtgctccgaataagaacgaacctgcacccgttgcaatcgcgataagcagacccgcgcccgccacataaataaaattgacgggcaaaatcgatttgacggtttttaaatcaaaggccaaaagcaacagcacgatggccgaagacgtaatcagtccgccgacaaatcctccgccgggagcgttatgtcccgataaaaataaatagaaagagaaaagcagaatgataaaagatacaagcttcgttgccgtctgaaggatgatgtcgtttgtgttttgctgtctcaacgctcttctccctcctcttttactttcgttctgatcatgccgtaaatcccgagtgcggcaatcgacagcaccgtgatttcaaacatcgtatcaaatcccctgaaatcaacgaggatgacgttgacgatattgtttcctcccccgagcttatggctgtaagcggtgaaaaaggaggagatgctgtcttttgttttttcgctggaagacgcgattccgagcattgtcacgatgacgccgacaccgagagaaatgataaaattcgtcatccggaatgttcttgtcttctttttccgccgcattttcggcagatggtaaaaacaaagaagaaacaaggcgacggatatcgtctcaatgacgagctgcgtgagcgccagatcgggcgctctgaaaatcacgaaaaacagcgcgagtgtgtacccgacaacaccgagtgagataatggccgtcagccgcgatttggcgaacacagtcgcaatcgttgcgctcaccataacgagggacagcacgatttcataaaggccgatttcagccatgcctttcgctgtcatggaaaagccgccttttgtgacgaacgccgttccgatgagaatgataaacgccgcaaagatatacagcagataatcccgcaaaaatccggtcatataagatgacgtcagctggtaagatcttttttccatactgcccgtcaccgcatcgtaaagcttgttcagcgtcagttttttcggaaacagaccgtacaaacactcccatttagacagcgttacgtaaccgatcgtgccgacaatgatgatgccgagggtcatcattacctcagccgtcaccccgtgccactgggaaatatggacatggaatgtacctccgccggttaacagagccggataaatggagttcatcgccggttcaatcaggctgtaagacaaaacgttcggtgtaaaaaacagactgacggcgcaagcggcaagaatgaccggcgaaatcagcatgccgagcggtgcttcatgcggcgtcttttcaagctgatcaggtttgcgcgcgccgctgaacgttctgaaaaacagctttatgctgtagatgaaagtgaagacgctcccgatccatgcgagaacggggaacagcacgccccacgtatccaggctgaaaatatctgcatgagcaatccgcagcatacttgtaaagaacatttctttacttaaaaagccgttaaacggagggaggcccgccatggaaaacgttccgatcagtgaaacggtgaacgttaccggcataagcgccatcagtccgccgagcctgcggatgtcccgtgttcccgtttcatggtcgataatgccgaccgccataaataaacttcctttaaaagtagcatggttaattaagtgaaacacagccgcggtgacagccgccgtaaaatactctgaatgctggtaatgaagcgcggcggctcctgcgccgagcatcgatacaatcataccgagctggctgactgtggaaaatgccagaatcgcttttaaatcggtttgtttcatcgcattaaaggaagcccataccatcgtgatcagaccgactgaggcaaccgtccaaaaccagacgggtgaaaatgcaaaaaccggactgaatctggcaatcagataaatgcccgctttcaccattgtagccgagtgcagataggcgctgacaggagtcggcgcctccatggcatcaggcagccagatataaaacggaaactgcgctgatttcgtaaaggcccccaataacaggagaaccatcgccggaataaagaacggatggcctgcgataatatgcacctggttgaccatttccctgatactgaaagaatccgtcatcagatacagcaggataaagccgccgagcatgcacagcccgccgccgacggtaatcagcagtgacttttccgcaccgtagcgtgatttcttccgcttatgccaatacccgattaataagaaggatgacaggcttgtcagctcccagaacatataaagcacgataacgttatcgacgagcacaacgccgagcatcgcgcccataaacatcagcaggtacacataaaaggggccgagcttttctttgtccttcgataagtaaaaaatactgtaaagcgtcaccaaagagccgatgcccgtaatcaataaagcgaataacagcccgagtccgtcaagataaacggtatagttaataccgagggacggaatccattcggccgcatatcggacggtttccccagccattgttacagggagcttgctgataaagtaaacaaacagcacaacgggcactatcagcacaaaccagcctgtatggacttgttttacccgtttataaagaaagggaacgataaatgcaaataaaaaaggcgccaaaatcgcgaaatgtaacagctgcaacagaagacctcctttgcttgttttttcatcaagcaactgctttatgtaagagtgaattaatcaattcacggtcataggacccagtacaaattatatcgcacttttttttaccctgctacggcataatgtattcctctctgtgtttttgtggtcttttgaacccaaaataaatttatcaaatatcctgatctttgtatatacatttatctttcagatcaagcttttaaaaaaggagctggtcagatgaagagaaaggcggcggcctgtattggaatattttgttctattattgcaggaacattcatagcggacgatttctgcaaaacgcggcagcagacggaggcagataattgggagcgtttttttctcggtgcggaatacgcagaagacaagctgagtgcggctgaatcaatgcaaacaccgtttcagccgcgtgagtatatcagaatcgtatatagatgaaaagagttccggcaccagggtgcggaactcttttttgtggcaatcagcgttttcctttaatgtaagggatgccgttggctttaggcgcatccgcgcggccgatgaagccagcaagcgcgagaatggtcagaatgtaaggagccatcagcatgtatacattcggaatgtctttgaacaggggcaaaagcgagccgataatgctcaaactctgcgcaaatccgaagaacagcgcagccccgagcgcgccgatcggatgccatttgccgaaaaccagcgcggcaagagcgataaagccttgtccggaaatggtggagtgcgtgaaatcaagcgcgatcgtggaagcatatacaccgccgccgagcccgccgaacagcccgctgatcatgacgccgatatagcgcatgccgaacacgttgattcccatcgtatcggccgccatcggatgttccccgacagaacggatgcggaggccgaacggcgttttgaataaaataaaccaggaaacaaaggccagtacgatggctaaaatcgacgtataatatacgtcggaaaagaaaatctttcctaaaaccggaatatcgcttaacccgggaatgttcgttttgtaaaagggctccgggattttatcagtctgcgcctttccgtagatcagcttgacgataaacagtgtcgctcctaacgcgagcatattgatcgccacaccggttaccgtctgatcggcgcggaaagaaaccgcggcggccgcgtgaatcagtgagaacagtccgccggcaatcatagccgcagccaaggcgagccacggagcggcggcgccaagctcgcgtccgaaaaataagttgaacatgacgcttgtaaaggcgccgataatcatcagtccttcaagaccgatgttgacaactcccgatctttcagaaaacacgccgccgagagcagttaaaataagcggagccgcatatacgagtgttgccgggacaataatggataaaatctgcaggaagtccacttacttcgccccctttttcttcaatttatcaaggatgagacggatggcgtagcttgatgccacaaacaaaataataatggcgatgacgatgtcaacgacttcagaaggcaccccggattcaatcggcatatttaatgccccgactttaaggccgccgagaagacatgccgccagaacaacgccgattgccgtgctgccgccgagaagcgcaaccgcaatgccgtcgaagccgacgccggtaaaggcgcccttaaccgccgcgtattgaaaggttccgagtccttccatcgcgccggcaagccccgcgaaggcgccggaaatcatcatggcgtacatcatattttttctgacgctcattccggcgtattgtgcggcgtgctggttaaagccgacagcccggaattcaaatccgctttttgttttatgaatgataaaccacatgaggactgccgcaaacagagcgatcagaatgccccagtgaaggcgggagtaatctgtcatctgctctaaaaacggcgagcggagcgacgcgctttcatgaattttgtctgttttgtcccggtggtccgtcatgacatcggaaatgagataattggttaaatgaagagcgatataattcatcatgatcgtgacaatcacttcgtggacaaaaaaacgggcttttaaaaatccgggaatcaggccccaaatgccgcccgcaaccgcagccgccaataacgaaagcggaaggtggatgtaagcgggggcgtcaaaggaagcgccgacccacaccgcggcggtccagccgacaaggagctgtccttcaaccccgatattaaacaggccggtccgaaatgcgaatgccacggccaatccggacaaaatatatggcgtaatctggcggatcgattccccgatgtaatacacttctccgaaaatgccgctccaaagagccgaatacccgcttacgacattgtagccgctggcgagcatgatgaccgcacccgcagctaacccaaggatgatcgcaatcagcggcacagccagatgagaaagtcgattaatcatgtgttttccccgcctccatttgcttacttcccgccattaaaagtccgagctcctgctcgtttgtttcaagcggattgacgtttgcgatgatgctgccttcaaagatgacggcgatgcgatcgctgagattcattatttcatcaagttcaaaagataacagaagcaccgctttaccggcgtcacgctgctcaatgatctttttatggatgaattcaatcgcgccgacatcgagtccccgcgtcggctgggccgcaattaaaagatccggatttctgtccacttcccggccgataatggccttttgctgattccccccggagagagcgcgcgcaggcgtatattcatcaggtgttctgacgtcgtattcttcaatcaggcttcgcgctttgtcataaatcgtgtgtttatttaatatgccgaaagaagagtagggcttttggtaataactttgcagcacgatattttctccgatcggaaaatcaaggacgagcccgtgtttatgcctgtcctgcggaatatgcccgatgccggcttcagtgactttcctgggcggcatgttttgcagctgtttgccctttaacgtgatcgtgccggcattcgtttttctgagacctgtaatggcttcaattaattcagactggccgtttccgtcaacgcccgcaatgccgacgatttcaccggctctgactgagagggagagctgtttgaccgcctcaacgccgcgcgcgtccttaaccgttacatcagaaagtgaaagcacttcttgtttcggctcggccgcttgtttatccgtcttgaatgacacttcgcgtccgaccataaggcttgccagttcatcttgatccgtatgtgcgacatcgagtgttgtaatgccttttcctttccggatgatggtgacacggtcgcagacttccataatctcttttaatttgtgggtgatgaggataattgattttccttcattgacaagatttttcataatctgaatcagttcttgaatttcgtgcggggtcagcaccgcggtcggctcgtcaaaaatgagaatgtcggcgccccggtagagggtctttaatatttccgcccgctgctgcataccgacggaaatatcggcaactttggcttcaggatcaatgtgcaggccgtaacggtcggaaatatcgcgcacgtcccgggcggcgcgctgtctgtcaattcggccgaaagttttcggctcttttccgagaatgatattttctgagacggtaaaggtatccacaagcataaaatgctggtgcaccatcccgatgccgagatcgttggctttgttcgggctgttgatgtgaacgcgttcgccccgcacccggatctcgcctttttccggctgatacaggccgaataaaacgttcatgagtgtcgattttccggcgccgttttcaccgagaagggcgtgtatttcgccttttttcacttgaagcgtgacgtcatcattggcgacgattccgggaaactccttgcgtatattaagcatttcaatgatataatccaccgatttgacgctccttttcagagatactttgatgagaaagagcttggcaaaagaaaagctgcaagagatgcagcttttccttcaccgctcttttcataaaagagaggggataagcacggaagtctccttatcccctggttcttactcagccttgaaggatttcaattctttttcagttgaagggatctcgagtccgtccgcgattttcttcttccaatcgtctgttgctttgatgacatcgtcagaaaggttctccttgtgatccgagatgccgactgcatcttgcgccaaaccgtatgttaatgttttgccgcccgggaatttcccgtcacttgcttttttcgttaagtcctctacggctgtatccacttttttgaccattgatgtcagagtgacattgtcttttgtgcctttgacttgaccttccgcgtactggtctttatcaacaccgataacccatacgttccgcttcggatcttcttttttcagatttttcgcttctgtgaagacgcccgttcccgttgcgccggccgcgtgataaatgacgtcaacgcctgatttgtacatgctttcagccgtcgccttaccgacatcggctttgtcaaatccgcccgcatatttcacttcgacggtcgctttcggatttgcggcttgtacacccgcgcggaagccgatttcgaattttttgatcaattcagactccattccgcccacgaatccgacttttcccgttttgctcgatagcgcagcggccgctcccacgaggaatgaaccttcctgctctttaaatgtaaggctcgccacgttgtcttttttgacaacggcgtcaatgatcgcaaaatttgtgtctttgcgctgatcggcgatttcgctgatggaatcctgcatcagatacccgacgccgtaaatcaggtcaaagtgttcccgcgctaatttatttaagttcgttgtataatctgcatctgattttgattgaagatagtcaaaaccgcttttgccttttgtaagcccgttgtcttttccgaatgcctgaataccttcccaggcggactggttaaatgatttgtcatcgacaccgccgatatctgttaccatgccgacggtaaagtttttgctgccggagccgtttgctttgtcacttgaaccgcatgcgcttaatatggttccggccgccgcgatgagcgccatcgccattccgattttgcgttttttcaaagatataacccccctgtaaaatatggctgtgccgttcaattcagacttgagtccccgtaccggatgcagaatcgaaaaaactttctgataataatgatgagacgtctctctttttcccgccttgagcggctgtctcttccggattcgggacttatgacttatctgaaaagatctgctaaccaatcataatttatcattttacccgccataaataaatagaaatttgcttattttttaaaaaatatcaattttatgaatcggcttcctcatctggataaaacagaggaggatcagccgggtcattatccttatatagcatacaaaaaaggaatctcaagccttttgtcacgggatatgacagtaaaaaagcaccgttcacagcgggacggcgctttttgacattataaatattgtttgatgctgctgacattgccggtgttgatatgatattggaagacgggtctgccgatcgtgccgtacgccatttctacattcagcacttgtatgtcttccagaaatttaaggtatttccggatggagacttgcgagatttcagtatgcttggcgagatcttctgtggtaaaagagccgtcaccgaaagactcaatgctcgcccagatgagtttaagcgtgctttttgtcaatcccttcggaaggtgaaccttttccgccgcttctttcttttgaaaaagctcggcatccaattctttctgtgtcatgcttctgtgtgattgataaactttctgcttgcgtctgtagtcggaaagagcggtttgaaagcggtcaaattcaaatggtttgattaaataatcgacggcgccgtaccgaagcgtttttttgatgacgtccagctcgcttgcggccgaaatgacgatgacatcaaccgattcattttgtttgcggatttccgttaaaagctcaagcccgttttttcccggcatgtaaatgtcaagaaggatgagatcgatatgatgctcgctcagcacgtgcagcgcgctttgaaaggatgatgcgatccctttcagctgaaatccttcaatctggctgagatagcgtttatttaattcacccaccatggggtcgtcttcaactatgagtacattaatcatcattttcctccttcggttcatacggaatgcgaagactgaaagtcgttccttcattcttttcacttgtcacaatcatatggccttttaaattttctgttgcctgctgggtgaaatagaggccgaacccccggtttgtccctttcgtggaataaccttgttcaaaaatacgggcttggtctgccgcagacattccggctcccgtgtccgtaatctctatatcaagctggcgatcctgaaaccgcattgagcacgtaatgttttttttcggcatctgcgccaccgcgtcgagcgcgttgtttaacaggtttccgataatcgtaatgagctcatggatgacggccggatctgccgcattcgggatcaggctgccgagctgaatgtccagatcagcgccctgttcgcgtatgtagctttgttttcctagaagaaaccctgcgagaaccggacttttgacatcacttataatctcgcttgtttccgtcttctgctgaatggcaatgtctttaatgtaagtgccgagatcatcgtattcttttaactggacaagccctaaaatgacatgaagcttattcatgaattcatgagactgggctcttaatgcgtttgcatacattttaacaccggacagctgttctgctaaatgtttgacctccgttttgtccctgaacgtggcgatcgctccgacagtttgtcctttcagatgaatcggaacctcattaaagaccagctcaagcccgttaatgcggatatccctgtcctgaagcggttttttcgtttcaatcacttgtttcagccggcttttcgggagaatatcgttcacatcttgatcgaccggattagtcggaatacccattttaataaaaagccgtttcgcttccgcattggcaagcttgatttttccccgcgcgtcaaccgccaggatgccttccttcgttgattcgagcatggcgctccgctcttcgaggagggtggcgatttcataaggctcaagaccgtacataatgtttttgacggtgcgggcgacaatgacggctccgatgacgccgacaaaaatacttacgcagatgatgaaataaagcggtctcaaactgtggctgacgacatcctgtattttgttaagcgaaattccgaccgaaacgacgcccacttgttttttatcttttccatagatcggtacgaaggctctcatggattttccgagagttcccgctgatgtgctcgttttgatatgtccgtgcaacgccggctgttcgtctccgccggtgaatttcttcccgattttatttacgtcggggtgggtgaggcggatgctgttcatatccatcaccacgacaaattcggttcctgtcgtatgctggacgtctaatgtataatcccggagctctttcagcccttttcttgtttgcaatgcccgcgcgacactcggtgtttccgcgaccagctttgcggtgcgcagcgcggtcgtccgttcttcttctttcacgcggtctgctgtttggacgctgatcgtgaaaaaggtgatacaaagtgcgataaggacgacaatacagacgaaaatcgttaatcgggtttgcaattttaatgtttttttcataacagccttccttacgtttatcattcccgcgttctactttactccgaaaaagccggtttgtgaagatcaggcccttatttcgtaaaagtgaggaaaaatggtattttttatcttgtcaatgtgttttaagtcctccataataagtgaggtagattacagaaagggactttttatatgaaaaatacttattggacgggttattttccgctcgttgcgattctgctttttagttcgtcattatccatttctacctcgctttatgtcatgaagatacttcagacgctcggcatgtatcaggggatgctggattatttctctgagaaagggatcagactggcgctttttgcagcgttcgcccttgtgtattttatgcttttttcagctttgaagctgattgcaaacacagtgacagagctgtctcttttgtttttcacaaatgaccctgaaggggacaatctgaaaaaaatcagattaggctctttaatttatgtaggcggaggaattctttcctttgcgctcgtgcagaatggtttttggattgcggcgttatttgccgttgttacgctcgtttatttgattttcatggtgtacagaatctattcgacactctcgatcgtttcgctgatcggttttatattgcttgagattctgttttggtttacttttgttatcggtattttgtacatctttatcaagctttataatagcataatggctagcttacctgtgtaagctagccatttttgttaagacagaaatctgtttttgatctcaggggaggggagcatgcatgcttcccttttcccgaaccatttgtaacggcgccgggcgatgaaagaataggctctgtccctgagggggcggggcactgcgaaaaaaaccgctgacagccgccaggctccgcggagatgacgggaaacctttaacacggctgcggattttttgtatatccgcccgttttcgataaaaatcatgctgtcaaattgttctgtcggaagtccttctgatgccaaaagctcccgggcggtatctgattgcaatgatgcaaatgagattttgccggccggatcgcgtttaatgatgaattgaacggcgccgctgcataagttgcagacgccgtcaaacaaaagtacgcggtccggaagctgagctggtttcaaagcggatcccctccgttatctttaataagctgcctgcagcgtgtttttccagatcgaaagctgagggcttgcgtcatgaaggtattcgacgcttgacggtgtatccttgccgacccatacccccatcgtataagcgtccgtcaggccgacaaaccacatatcgtgatagtcatttgacgttcctgattttccgccgacgtacggagctttaaagttcgctttttttcctgtaccgctcttgacgacggctttcatcatttctttgatctgcatgttggtccgcacgctgaatacctgcgtcggctcatctttccattttaatatcgtttttccttttaaatcagtcacttttgtaatcgcgtgactcggcgtataaacgccgttgttgccgaacgtggtgtacgcattggtcatttcaagcggcgtcatgccgtttgtaaaaccgccaagcgccgcaggcagacggtaatccgcgctgaccagcttcgcgaaatgaaacggttcaaggtagctgaacgccttattgacgccgacgcggtccatgattctgatggccggtgtgttgtacgagtatttaaacgccgtttccagcgtgaccgtaccgtacgtgcggttattgtagttttgcgggcagtaatccgcactgcagaatttgcttgcgtcaatcttgctgtgtggcgttgcgccggtcttttcaatgtaaggtccgtaatcaagcagcggcttaatggatgaaccgggctgtctgtatgcctgataggcacggttgaaatcatatttatggtaatctttcccgcctgaaagcgcgataatctgatgtgtctgatgattaatcacggccgctccgccctggacgcctgcatacggcagattttgattcacttgggcgacgacctggttttgcatatacggattcagcgccgtataaatcttcacgccgtcttttaacaatgtgctgactctgtctgaaagctcactctgtattttttgtttcgcctttccggaagctttttcaagacgtttgtcataaccttcggatgatgaaacaagctgtgtgaattcatcatttacataggaaacatagtcaggatatttatttgttttttcgtttatatcaagcttgatcttttccttttcggcttttttcagctgtttcccggatataacgcctgctttttttaatccgttaagcaatctgacttgtcgttttttcgtataatcaaaatgcttgagaggatcatataatgtagggttattagggatggcgcagataaaggccatttctcccaaagtgagagatttcagcggcttgctgaaataaaattgtgccgccgaaccgacaccgtatacgccgttattaaaataaatcgtatttaagtagccttctaaaatctcatctttgctgtattttttctcaagctgataggaataggccagctccgtcagttttcggctgaaggtgcgttcatggcttaaatacacattccttgccagctgctgggtgatggtgctggcgccctgatcaattttatgatctttgaaattggaggcggccgccctgaccatccccataaagtcaaaccctttatgctcataaaaatgacggtcttcagaggttaaaaacagttgttttacctcattcggtattttattaaagggcacgatcacgcggttctcatgatcgctgacaatctcagaaacaaggcttccgtccctgtcatacatgtaactgttttgaaccaggttgatcgcttttaaatcaatatgtttatcgagcacctgatcaaaaggcttgatttgttttacctctttgccggaagcaataactgtaaatgcacacaacgggataatgccgagcagcaaaatccatccgattattttacgtaccatggtcactctcttttctcctgatttctagccatatcgtatcattcttttaagaatacgagaaggttaaatttagaagaaatcgtgatcgctgccggtcagcccgcatttgacgctgtatccttttgcagatgtcccgccatccataagagccccgcgcctattaaaaagagaaaggcggtgacgtagaaagcagccgaaatggaaaaaccgcttgagaccgcacctccgagcagagggccgagcacatttccgagaaaacgaaagctgacgttatagccgagcacctctccctggatgctgcccggcgccctgacgcggattgcggccgtaatgcaggggagcgtgccgcccatgaccatgccgaacagaaatctgaagactaacagaatggagagggaggaggcgagcgcctgcggaatgaaaaacaccgctgaggcaatcaaaagcacgattaagatccggctgtggccgaagcggtcgccgaagtccccccatttccgggcaagcagtaagcttccgagtccggtagctgaaaacgccattccggagaaaaaggctaaattaacaggtccgtgcagctcattgacatataaagcgagcagcggctggatgctgaaattgccggtctgcacgatcatagtaagcaccatcatcgcccaaagcgcgggctggtgaaaaatataggagagcacctgttttctggaataggttttccgcttgttttgtttctcgccgagcggctgctcattgacctgaaataaaacgagaagcacggatgcgaaaatgacaaaagacgtaataaaaaatgtgtacgtaaacccgaagctgtcagcgagcagcccgcccagcatcggtccgaataaagtgcctgacacctgacccatctgcagcgtgccgagcgtcttcccggcagtctctttcggcgtctgcgccgaaatcatggcaagcgatgtcggaacaaagcctgttactagacccataagcagccggaggacaaacagctgataaacggatgtcacaaaccccatcaataaaatgctgacggcaatgccggttcctgtaatcaagagaatttttttgtatccgcgcttatcgccgaatctgccccaaaacggggaaatcacaaacgccattaaaaacgtgacgccgaacacatacccgctccatctctgcacatacccgcccgaatgggggctgatcgtttcgatatataacgaaagaaacggaacaatcatggtcatgctggcggaaataaagaaatttgtaatccaaatgacgacgaagttcttcttacggacagaaataacatcaccttctttacttttcgtgtatctaatcattagtatataggaatgaatccggtatttgtattttcgatgcggatataggaaaattcattatttttagaaaatgaagaaagtttcagaggggaaactgatatactatcataaaatatcatttttgatcggaggaaaggcaggtgtaaaaaaagtggatcagcgcagtctgctcattattgattttgaatttacgatgcctgacggaaaatacagcccgcaaaatttctttcccgaaattattgaagcgggaattgtcaagacggtgaatgatgaagtgactgaaacgttttcgagttatatcaaaccgaaaaaatttccgaagctgacgaaacgatgcaaaacctttctgaacatcacccaaaaagacgtggacggcggaatcacgtttaatgaattcatccgcaaattaaatgagcttgatcctgataaaaactgcacgatcgtcacctggggcaatatggatatgaaagtgttaaagcaaaattgcatgtttaaccacatcccttttccgttcaaaggagaacttcgggatctgtcccttgaatacaaaaacttcttcggcgacagaacattgaccggcctttggaaagcggcagaagagtatggcgataaagggacgggcacgcatcataaagcgctggatgatgcgcggacgacatacaaattattcaagcttgtcgagcgggataaacaatatcttgaaaaaccgaaacctccgacgatcggtgatcgcgtcgatctgactgaactgtttcgccgggccacataaaaaaacccaatcatgccgactgggtcaagttcttttaaaatagtcacgctctaacgcggccaagttgtcgagcgaacgttccgcccattctgagccgtccgctgtaagctgatctttcagccgggcagacgccgcttgtaaggaagccgtataatcaggcacctcgccatcaaacggtttgaccatctgatgcggtatgtttgtctgttccccgaatgcaagcgctcttctttcatgaaaaaacggaacatccgcctgcttcggatgatgaagatctccttgagcgggatgcgtcagaacggctttaattttcactaaatagtgattgggcctgacgtctgtcacttcccctatgtatgctcctgttttataaaacccttttacgattgtgccgatttcaaacgtattcatagcgttcacctctctctagttattctataaaagatcaacgcggttggctagtgaacagctgccggaagcctgactgaggccgttgtgcccgagtgctcgccgctggtgaaacagacggagccttcatgatgctgaataatcgagaatgtcacggtaagcccgagcccggtgccgttcgttttcagcgtataatatggtttaccgagtttctgcagttcttcatcggacatgccgattccgttatccgtaatctgaatgagaatcatctcttcctgtttttggacggagacctcgattcggccgttttcagagggcacggcttcaatactgtttttaatcagattaatgaaggcctgtttcagtttttttacatcgccgaacacatataaatcaggctcgcttcgaaccgtaacggtcaccgatttaaaattggcataagactccattaaggaacctgtttcctttacgagcagagaaatatcaaacttttctttttcatagtcatcctgcttcgccatatcgagataattcgtaatgatcgtctgagcccggtcgagttcggacagcacaagtttctgatatccggagtgggatttgtcctgaagctgctcgccgctgaacagcagctgcacaaaacctctgacgaccgtaagcggattgcggacttcatgggcgacgcttgccgcaagctcgctgacgacggccattttttctgagtgaatcagccttgcccgcatggacgcattctcatcaatgatctcaatcaaataaatgcacagcaaaagggcgctgacttgaaaaaaaacagatactgccgcctcataataaacggaagatagattttgaaaattgaaaatattggtcgcggaatagatgaagacagatgcggttaataaggcggtttcagtgcagccgatgagaagagcgaaaagcagtttcttccgctttgaaaaaaaaggccatttcgtttggagctggatagggatgatgattaaaaaaggaattaaggataagaaaaaaagagcggaaggttcaaaccatatgagctgaaaaaaaacggatgccgcccctgcggcaagtcctgcggcggtaccggaataaagcaggcagacgataatgggaatcagctgcaaaccgtaacggacggaatgaagctcctggatgggaaaagccgtacataataaggaagatgacgctgcaaatacggcgaccagcaggcggttcgctctcggcacaagcaaatcgggcttgctgagccagaagacttgataaagaaaaatagggaataaaataaaagagaagtgaagcaggtaatcctttacaatctccatttatgcgaaatcctttcctatgtaaatatgaatctattataacatctttaccggaaaaaaaagtatatatttctctaaagcgaacgcccttatctcatctgataaaggcgttctttccgctgctaagcgagcgctgctttcattctctcaagcccttcttttacggcggcggctgaacagccgacattaagtctcataaatcctttgccgcccggtccgtattttgttcccggctctaatatgattttcccttttttgagcattctttctttgagctcggcatccgaaaatccgtattcgctgaaatccatccagatcaaataggaagcgtcaggcttcatcatgcggactttcagcaattcttttcttaaaaagtcctcagccaatttcatattcccttcaatgtaaggaatcagcgcgtcaagccaagggcctccctttgtataggccgcttcgattgctgcaaccgcaaatgtgttgaggctggaaattccgttctgatgcaatgcggcggagaatttcgcccgcttataccgatcgggaatgataatggcggatgcctgaatcccggcaatattaaacgtcttgctcggcgcgacacaagtaacggaaatccgcgcaaactcctcagacagagaagcgaaaggcgtatgcggctttccgtacagcatcaagtcggaatgtatctcgtcagaaacgacggtgacgttatgggcggcgcacagcgatccgagcttcataagctcatcccggctccacgctctgccggacggattgtggggattacaaagaatcatcagcttgacctcagaatcgttcagctttttctcaagatcctcaaaatccatacagtagacgccgttttcttcccgtaacgggttatgtaaaacctgccgtttgttttccttgatcatctgataaaaaggcgtatacaccggtgattgaatcaacaccggatcgcccggttcggtaaaggcttgtacggccatgctgattgccgtgacaacaccgggactgaacgcgatgtttgcgggatcgggccggtagccgtgccgcgtctcaagccatgaagcgacggcttctcttgtgttttcgtcaggagacgtgtaaccgaatatgccgtggtcaaggcgggcttttaaggcgtcagtgaccgcttcgggagcgcggaaatccatatcggcaacccacatcggaagcgcatccgatacgccgaataacgcttccgccttgtcccatttcaccgattgtgtgccaagacggttttctcgaagatcaaagttcatgtatgtcactcctgtagtatcattattttgcacagcgtatctatgataaaatagaattgcaaactttattataagcggtgatgaaaatggaagaaagccaagcggtcatggaaatgatgaaaatcattgccaagtgggacccgtttaaatatggagaagatttttatgagacagaagccgtcgacatcgttcaggccgtctacagtgaagaccgtgccgacaagctggcagcagccattcaggatatctttgaagcttcatttgagcaaaagcttccgatcgaaggatgccaaaaggccgctgagcagcttctgttcataaaagaaagcagctcctgcaccccttaaaaaccggcggtttcgccggtttttttattgaataaattcaaaaatccgctccgaaacaaactccgggcgctcttcaggtacgaggtgccccgtatccttgagtgaatacagaatggaatccggcaggtcgtcatgaagccgttttccgactgagaccggaacgacacggtcttcttctccccagattaaaagagcggggttttgcactttcttcaaatcctcgggctctaaatcgccctccctatgtctgataaaccttgtcatcgctttgaaaatctggcggtctgtaaatggtttttcgtaaccgtcaatcatttcctgatcgataagcgtccggtcgtgaacgacatttaacaggttgttcagcacgccgtcttttgaaagccaatacttaagatacaggtcaaaacaagggagatgcgtcccgaatataatcgacgggtgcgagcgctttaaataccccgagctgcacagcaggacgattttagaaaaaagctcgggtctgagaagagacgcggataaggaaatctggccgcccattgaatggccgatgagtgcggcccggctgataccgagcttttccagaagtccgatcagaagcttggcgaggtttgcgtaagtatatacgaaagtccgtgacttttccgattgcccgaaaggaggcaggtcaacggcgataatatcataatggtttctgagcagcggaatcagttttctgaagctgaatgccgaagataaaaaaccgtgtacgcagacgagtgtctgtctgccgggattttcataatgctcgtaatacagctcaactccgtctatcgcggcccgtttaatcggtgaaacagcttccatgagagccttcgccgtcctttctttgtgtaatgtaaaggcttttttgattgtcagattttagctctggtttctttcgggtttttcttagcatttgtcgaaaatcgtgatataatgtcatgaagatttttgataatgcaaaggtgtgaaacgtatgaagctgaccgaaaaagaaacagaaatattagaaattttagacgaaaacagccgcgttgatgcggaaacgattgcgaaaatggcaaacattcccgctgaagaagtcaaaagcatcattgaaaagcttgaaaaggaaaaagtcatcattgattatgcggcgatgatcgactggcgcaaagtcgacggtttggaaggcgtcacggcgatgattgacgtaaaagtcactccgaaacgaaatgtcggctttgatgaagtcgctgagcggatatacagattccaggaagttgaatcagtgtacctgatgtcaggggtgtatgacttatctgtcgttattcgcggcaacacgatgtcagacgtggcaagcttcgtgtctgaaaaattgtccacccttgagtctgtcgtttccacgacaacgcacttcatcctgaaaaaatataagcatgacggcaaagtctttgaaagcggagacgatgacaaaagaatcgtggtgtctccgtaaatggaaacgaagacttcttatttatctgactacgtgcagcagattaaaccgtcaggcatccgcaagttctttgatctggccgctacgatggaaggcgtcatttcactgggagtgggagagcctgactttgtgacggcctggaacgtgagggaagcgagtattctttctttagaacagggttatacggcttataccgcaaatgcgggtctttgtgaactgagagaagaaatcagccgctatttagatcagcggttcggcctgagttattcgcctgacagtgaactgatcgttactgtaggggcaagccaggcgcttgatctcgctgtccgcgccattatgaatcctggagaggaaatgttaattcccgaaccgtgttttgtcgcatatgaatcactcgtgaccttgacgggggcgaagccggtgccgattcagactgtcgctgcaaaaggtttcaaagcatcagcagccgattttgaagcggccctgacggacaaaacaaaagcgctgcttctatgctcgccgtcaaatccgacaggttccgtctattcgaaagaagagcttgaatccatcgctgctttcgctgaaaaacacgacttgatcgtgcttgccgatgaaatttatgccgagctgacgtatgatgagccattcacgagcatgggggccatccgcggcatgaaggaacgcacgattcttatttccggcttctccaaagcatttgccatgacggggtggagactcggatttacggcggcgcctcccgtgatcagggatgccatgctcaaaattcatcagcacgcgatgatgtgcgcgccttccatggctcagtatgcggcgctcgaagggctgaaaaacggccaggaagacgtcgaaagaatgaagaaaagctatcggagacgccgaaacctgattgtggagacattgaacgaaatcggactcggctgccaccaccccggcggagcattttacgcctttccttccattcagtcgaccggcatgagttcagaagaattcgcggaacagctgctcattgaagaaaaagtagccgtcgttccggggaatgtattcggcccgagcggcgaaggctacatcagatgttcctatgcgacatccattgagcagattcaggaagcgctcgtcagaatcaaacggtttgttgaaaaaagggcataaaaaaagatacgaacccggttcgcatccaaataaaaaggggggaatactagaaagccttcgtaatcatagtataccctcctttatctgtgcttaaacttgattatgtaaaaaagttctctttgcgaaaaacaaacttgtatgatataattttaaattgcgtataatctgtatttaatttaacttaggagttgttatgaatggcagcaaaatttgaagtgggcagtgtttacactggtaaagtaacaggattacaagcgtatggtgcgtttgttgcattagatgaagaaactcaaggacttgttcacatttctgaagtcactcacggtttcgtaaaagacattaacgaacacctttctatcggtgacgaagtacaagtaaaagtacttgcggttgacgaagaaaaaggcaaaatcagcctttctatccgtgcgactcaagcggcgcctgaaagaaaagaaagcaaaccaagaaaaccgaaagcggctcaagcttctgaagaaacatctgctccgcaaggtttcaacacattgaaagataagcttgaagagtggatcgaacagtccaaccgcaaagaccttatcaaaaaataatcattaaaaaaagcaccggatatgtatgttcggtgctttttttatgtttatctgacttccggatttgccgcttcctcgcgggatgtttcttcgttcggcttaaacagcaggccgagattgatcagaccggcgatgccgacaaggccgtaaataatccgcgacagagctgatccttggccgccgaagatggctgctactaaatcaaattggaaaaacccgatcagtccccagttaatagcgccgataatcgttaatacgagacagatacgctgaataacactcatgtaaacaacctcctctatgaattcgtgaaacagttatagattgtgacaaagcaaagaatctatgcatactacattctccgccgtgtaaatcacacactgtttcaagctgtacaagtgcctttcccgggaattcgatgtctgtaaaccatgtgatgcgccgtcaaaaaagcggattgctttacattgaacgtcatctttctgcataatataaatccaaaggaggagatgtcatgcaaaactttacatattggaatccgacaaaattgattttcggaaagggagaggttgaaaaacttcctgaagaaatcaaaccgtacggaaaaaacgtgctgctcgtatacggaggaggcagcattaagcgcagcggtctttatgatcaagtaaccgaactgctgaaaaaagcgggagttaccgtacatgaattggcaggcgtagagccgaatccgcgtgtctcaacggtgaacaaaggtgttgcgctctgtaaagaaaacagcatcgatttcttattggccgtcggcggcggaagtgtcattgactgcacgaaagccatcgcggcgggcgctaaatatgacggcgacgcgtgggatatcgtcacgaaaaaacaccagccgaaagaagcgctgcctttcggaacagtgctgacacttgcggcaaccggttcagagatgaactccggatcagtcatcacaaactgggagacacaagagaaatatggatgggggagcccgctcgtttaccctaaattctctattctcgatccggtaaacacatttaccgttccgaaagaccacaccatttacggcatggtcgatatgatgagccatgtgtttgaacaatatttccaccacacgtcaaacacgccgtatcaggaccggatgtgtgaatcgcttctgcgcacggtgattgaaacagcgccgaaactgatcaatgatctggagaactacgagcttcgtgagacgattttatatacaggcacgatcgcattaaacggaatgctgtcaatgggcgcaagaggggattgggccacacacaacatcgagcatgcggtatcagcggtttacgatataccgcacgccggaggtttagcgattctgttcccgaactggatgagacatgtgctcaaagaaaatccggcccgctttaaacagcttgccgtccgtgtcttcgatattgacgagacaggcaaatcagatgaagagatcgcacttgaaggaatcagcaggctgtctgatttctggacgagcctcggtgctccgaacagactcgctgattatgatatttctgatgagaagctggatacgattgcagataaagcgatggcaaacggagcattcggacagttcaagtcactgcagaaagaagacgtgcttgcgatactgaaagcatcattgtaataacataaagggggcgaccggattggcagctcctttttttctgtgttatagtaattcccttacgatttttttggaggtcatgataaatggagaactttacgtactacaatccgacgaaactgattttcggaaaaggtcaaatcgaccaattgaaaaaagagctgaagcaatacgggaaaaacgtgctgcttgtatacggaggcggcagcattaagcgaaacggcctgtatgaccaagtaacaggcatcttaaaagaagaaggcgcaaccgttcatgagcttgcgggcgttgaaccgaacccgcgtctggaaacggtaaataaaggaattgagctgtgcagaaagcatgagattgatttccttctcgcagtcggcggcggaagtgtcatcgactgtacaaaagcgattgcggccggtgcgaaatatgacggcgacgcatgggacatttacagcaaaaaagtaacggcgcaggacgcgctcccgttcggcacggtgctgacgcttgcggcgacaggctctgaaatgaaccctgattccgttatcacaaattgggaaacaaacgaaaaattcgtatggggcagcaatgtcactcatccgcgtttctccattttagatcctgagaatactttcagcgttccggaaaaccaaaccgtatacggcatggtggatatgatgagccacgtatttgaacaatacttccacaatgttgaaaacacgccgcttcaggacagaatgtgttttgcggtccttcagacggtaattgaaacagcgccgaaacttttggaagaccttgagaactataagcaccgtgaaacgattttatacgcgggtacgatcgcattaaacggcacgctgcaaatgggctatttcggcgattgggcttcccatacgatggagcacgccgtatcagcggtttatgacatccctcacgcgggaggacttgcgattctgttcccgaactggatgagatacacgctggatacaaatgtagaccgttttaaaaacctgatgctcaacatgtttgacattgatactgaaggcaaaacggataaagaaattgcgcttgaagggatcgataaattgtccgcgttctggacaagcctcggcgcaccgtcccgccttgcggattatgacatcggtgaagacaaacttgagctgatcgcagacatcgccgcaaaagaaatggaatacggcggattcggcaatttccaaaaactgaacaaagatgacgtacttgctatcttaaaggcgtcactgtaagatacatttccggccggggtgaagatgaaatagattttcaagctgcagatgtaaccgttttgggagtcccttcattagtgcatcaagagcaagtgaaacaccccttgccatgagacaactatggaaatctcacatgatgcggatttgactccctgtttctgtacatttagcagaaaaggatcaattaactttgcgattgccgatcatctatttacacaaaatctaaatcatgaagagccgcgaatttaaaaaaggagcgctgattcaatcagcgctccttttatgcattttgtgtactaagatcccgctgcgcccccatatagcttcccattaagttttgataaccgggaagatgactggagattaatgcgccaaaaccttcaacatcgttgcgccaatcacgctgtaactcgcatgctacgctgaaccagttcataagctgcgcgccgccatgagccatacgcgttaatgatgcatctgctacttgcttattaaacgtccccgaagcatctgtcacaacaaacacttcgtagcctgctttaatggcagaaagcgcaggaaaagcaacgcagacgtctgttaccacccccgcgataatcagctgttttttgccagtcgcctcaatggctttaacaaagtcttcattgtcccatgcattaatttgtccgggacgggctatttttggcgcatcgggaaagagatcaacgagttcttgcatgagcggtccgttgggtccattttcaaaactcgttgttaaaataaccggtaaatcaaagaatttagccgtatcaccgagagccaatacattgttcttaaattcatcaacgctatagtcacgcacgagaccggaaataaggccggtttgatggtcaactaaaagcacggcagcatcatcttttgaaagacgggaataaagatcagacattttatcatcctccttgaattaaggcaagtaagtttgtcaattgaaaacggtaaatctattcatatgctgtatagaaagaaagttatttctgaggtgacttttcgtgagggggatgatccttcaattaatttggaacgggaaccggagcatgatcaatccaatggataaactgttgtaaatagcgttgaagataacgttttgtttgttcatccgtcagtatgttttgagcggaatcaattttctcatggacttgcgaaatcagcattttttgaaagggcaaaacattgacttgcatagcttcgagtacttccctcatttgcgtttgaccaaaggcagtaccgaaccctccgggggttgctccgattaagccaaccggttttctgtttaaaacagaaggggtccgcggtctcgatgcccagtccaatgcattttttaatacccccggaattccgaaattgtactctggacttacaatgatgacgccgtcaacgtcttgtatatcagctctaaaggatgttacggagtctggtgctccggcaatttctaaatcttcgttaaaaaaaggaagactgtctatttcaacccaacgaaattgagccgcattatcgaaagtcaatcaatgattgagcaattgctcgattatacgagttttttcgtaaacttccacaaataagaccaatggttttagtcataaaatcacctcccggtttaaaatcactttcatcttaacacgataccccaaatatagacactatttttaaaaatggacatttatgccttaatattccttcgtggcagcctctcaagaggagtactatataaaaagaaccggcccatcgggattggcgatggatgtcatcctgctccaaagtaaaggtgatacgttcctggatcaccaacattcgattcgttatccctctcacgattattacaaatataaccatatcgaatccggggtattgtataaaaaatgaatgcatttttagcgcaaatcccatattcatcatgccttcttcatgacttgatttagcgggtgagttcatataaagtgaaagagaaaacaattcaccgtgatggagggacaagcaaatgacgcatgtacgctttgattactcaagagcgttaccttttttcaatgaacatgaacttacatacgcacgtgatttcgtaaaaacggcacaccataatatccatgaaaaaacaggcgccggaagcgactttttaggatgggtggacctccctgaaaactacgataaagaagaattcgcgcgcattaaaaaaagcgctgaaaaaatcaaatcagattcagacgtgcttctcgtcgtgggtatcggcggttcatacttaggcgcccgcgcggcgattgaagcgctcaatcattctttctataacgttctgccgaaagacaagcgcaaaaaccctcaagttatctttatcggcaacaatatcagctcaacttatatgaaagatgttatggatcttttggaagacgctgatttctctatcaatgtcatttctaaatcaggcacgacgacggaacctgcaatcgctttccggattttccgcaaacttcttgaagaaaaatacggaaaagaagaagcgaaagcgcggatttacgcgacgacagataaagagcgcggcgctttaaaaacgctttctaatgaagaaggcttcgaatcattcgttattcctgatgatgtcggcggacgtttctccgttctgactgcggtaggtcttctgccgattgcggtaagcggggctgatatcgatgaaatgatgaaaggcgctcttgatgcaagcaaagacttttccagctcggaattagaagagaacgcggcttaccaatacgccgtcgtccgcaacgttctgtataataaaggcagaaccattgaaatgcttatcaactatgagcctgcgctgcaatactttgcggaatggtggaagcagctcttcggcgaaagtgaaggaaaagatgaaaaaggcatctatccttcttctgctaacttctcaacagaccttcactctctcggtcaatacgtgcaggaaggcagacgcgatctgtttgaaactgtattaaacgttgaaaaaccgaagcatgagctgacaattgaagaggcggaaaatgatctcgacggcttaaattacttagccggcaaaacggtcgatttcgtcaacaaaaaagcgttcgaaggcacgatgcttgcccatacagacggaaaagtgccgaacttaattgtcaatattccggagcttaatgcatatacatttggatatctcgtctatttctttgaaaaagcggtggcgatgagcggttatctgctcggagtcaacccgtttgatcagccgggtgttgaagcctataaggtgaatatgttcgcgcttctcggcaaaccgggctttgaagagaaaaaagcagagcttgaaaaacgccttgaaaaataaaaagaagggctggccctcagcatgacgggtcagccttttttaaaccgtgaaaggtgtgatgatgaatgatacgactcttatgtaagcatgccgtcatttccgtctgttccgccgctattgtctattcggcactaaaactgtctcctgaatccctcttacaaaccatcctgtttttccctttccctctcggcttgtttacggacatggtccggctgaaactgaagattggccggatgcagtcgctgatcacgaagtgctgtctctatgccgccgttttctatatttcaacggaagccgttctctccgcaattgtgacgtatgttctgattgaatgcgccgttatctctttccggcgtctgtctgccgctcccgattcttcccgggcgccgtatgaagacgccgcagagcggggacgctaaagacaaaaaggagcatatgcacatgatcagcataccatcttcacttgaggggcaatcgtttttactccgcgaactggaacaggtgctgaaaccgatcggttataccatcggagacggctgggagtatgaccgcgggttctttgattacaaaatttccgatcaggacggctatttatttctccgcatccctgttgaagcaaataagggacacctggatgaacggggggccgccgttacaatcggcaccccctttttgctgaggcacgtctatcaggaggaaacggatgatcacgcaggcggcggtgtttttgagtcattattcaaccaattctccgagccgaaacggcgggatgcggcaattgaccgctcatatacagatatcgggatctcgcttgtaaaagagctggaagacgtcctgctgcattaaagagccaaaaacagatcagtatcgagcacctggtatgacaggggaggggtcagcatcggcccctcttctttttgtatgccgatgatcgtggtattccgtttgagataatagagcgcacagtcatgataagatgaaccctttaattcctcggggacgggaatgatgcgcacctttttctccagcgtcagatctgacagcgtttgcggtttggcaagctgcagcttgacccggtaatgctcaaacatcacccggctcgacaggcgtgatgtgcacagaatcttattggctcctgcgcgctcggcgtttttgacataccgttccgttaaaatttccacgatacaataaacggacggatgcagccctttgatggcgagaagcgttaataccgacagcatatcagcttcggattcatttttctgctggtctgctgtcaaaatgacggtatcggcttccgtaatattcgccttattgagcgtactgtcatcagcggcatgtccgcggatgaaatggacgttttcaataagcggcccttcccttaatgaatcatcaatcaggacgacagtttttgacggcgcgatgtgctgcagttctttcagcagcatatgcgacttctcattccatccgataagaatgacgtgccccttgcctttaaaggcgaccttcccttcgacatagcgatgctgtttgctgaacacggctgaagaaagcgtggcgaaataggcggttacaaaactcgctccgcttaatacaagcaccatgccggcaatctgcccgagcggcgtctggggcacgtaatcgccgtagccgactgtggccaccgtaataaccgcccaccaaaccccttcaaacacagacgtgaattgcttcggctcaagcatgtaaatgagttggccgaacaataaaatcaaggcgataatgatcagtccgatccgaacatataacggccatctcagccaggaaataaataaacggtttgatttcattcgcccggctcttctttcgacagagagatggataaaatctgcttaataatggtgtttagtttttcgttcagctgttgctggccgtatgagtcacgcgcatgtctgattaaatcggccgtctcatcttcaaactgaatgagaggttcgtcgttttccgattcattatagagctggataaaggcgtcaagcccctcgttcattctgtctatcgcattgctcagctgttctttctcgccatttgtcactttcatgtcgatcacacctgtatctttttttatacagtatgtcccagttcgtttgatgtctttcaaaaatcgccgaaaacatattcaccctcattttttcatatgataaagaaagcggaccgaaaaagggtgagtcaaatgacagtcattcaaaaactgctggcggcgctggccggagcgcagctgctcgcttcggcggccgtattgcttattttcgatttgaatggatacaatcatatgtccggcggattttcatggcttgtttttgcaaaagagaccgcaggcacgtttccgttttacatcggattggccgggtgtatcctcatcatgctcggaggattgattcctgtcagaaaaaagaagcggatttctgtacaggaaagcggacaatcattaaaataatatataagcaaatcgtacgatataagagaaaaaggaagaggataatatgctgtttatctttttaacaattgctgcattgggattgtcgttttgggcacaatttaaagtgaaaagcaattttcagaaatactcagacgtagaagcttccagtcagcggacgggggcggaaacggcaagacggattcttgatattaacggtttatatgatgtgccggtagaaccggtaagaggcactttaacagaccattacgacccgacggagcgggtggtgcgtttatctgagccggtatattacggccgctccatttccgctatttccgtcgcttcccatgaagtcggacatgctttgcagcatcaggaatcatacggcgcgcttgtgctgaggcacaaaatttttccggtcgtcaattttgcctccggggtcgcccctctgcttttcttgggcgggatgctcctgggcagcttgaacttaatcggactcggcattattttgttttcggccgctgtttttttccagcttgtcacactgcctgtcgagtttaatgccagcgcgagggcgaagcggattatcgtgtcggaaggattcattcgcaacagtgaagaacacggcgtgaataaagtgctgaacgccgccgcgctgacgtatgtggctgcggcgctcgtttcattattcgagctgcttcgttttgtgatgattttcttaaatggtcgtgatgagaattaacacgaaggaggtggccccttaccgtttgcggtaggggtttttttgcttatattaaaactgattctcattatgctgttaatcggattaacggccatctttgtcgctgcggaatttgcgattgtcaaaatccgcggttcaaaaatcgcggagctggttgaaaccggagacagccgggcgctcgcggcgcacagggtgatttcaaatctcgatgaatatttatcagcgtgccagctcggcattacgattacggcgctcggactcggctggctcggtgaaccgacgattcagcggcttcttcatcctgttttcagcctgatcggaatgccgtcatccattacgcacgtcgtcacgtttattgcggcgtttatcgccgtcacgtatctgcacgtcgtcatcggagagcttgcgccgaaaacgatatccattcaaaaagccgaagccgtcagtctgtggacggcgaaaccgctcattctgttttataaagtgatgtatccgtttattaagctgttaaacggttcagccggatttttggtcaagctgttcggttttcattcggtgaaagaacatgaggtcgtggtcagtgaagaggaattgcggctgattttgtccgaaagctataaaaaaggtcaaatcaatcaatctgaattccgttacgtcaacaaaatatttgaattcgataaccgggtcgccagagaaatcatggtgccgcgcaccgaaatcgccgccatctcgcttgaacagtcagttgatgaagccatacatttgatcatcaacgaacggtatacgcgatatccggttattaaggaagacaaagatcacattctcggcattattaacaataaggatttatttaaggcgtattttctcggccgctccattgaattaaaagaaattatgcgtccggtcatcagagtcattgaaagcatccccgttcaggagcttttgatccgcatgcagaaggagcgaattcatatggcgattctcgttgacgaatacggcggcacggcgggacttgtgaccgtcgaagacatattggaggaaatcgtcggggaaatccgtgatgaatatgaccaggatgaaatgccccacatcgtcaaaaaaggcgaacaccattatgtgatggacggcaaggcgctcatagaagaggtgaatgatctccttgatatcgccatcgaaaatgaagacattgacacgattgccggctggctcttaacacaaaaaatggagctgaaaaatggtgatgtgtttcatgccgaagggtgtgaatttaaggtgctggaagcggaagaccatcatatccgcttcgttgaaattaaaaaaactgatttctgagcctcctgcttttgcaatgaggctttttttatggaaaaaatgcttcttcgtcccgctccttcatatgatgtaaagaaaggagtgtcggtatgaaaacggattggtggaaaacggcggccgtctatcaaatttatccccgaagctttatggattcgaacggggacggaatcggcgacatgaacggcatcagagcaaagcttcattacataaaagagttgggggcggatgtgatctggctttgtcccgtttttgactcgccgggcgcggacaacggctacgatattcggaattataaacaaattgccggcgaattcgggacgatggaggattttgaccggctccttgcggatgtccatgcgctcggcatgaagctgattatagacctcgtcatcaaccatacaagcgatgagcacccttggtttatcgaatcacgctcggcgaaagattccgaaaaacgggactggtacatctggagagacggaaaaaacggcaaagagccgaacaattgggaaagcattttcggcggatcagcgtgggaatatgatcaagagaccggccagtattacctgcacctgtttgacaaaaaacagcctgatttaaattgggaaaacgaagcgatgaggcagtccgtttatgagatggtccgctggtggcttgataaaggcatagacggcttccgggtggatgccatttctcacattaagaaaaaagaagggctccctgacatgccgaatccggacggtctcccgtacgtcccgtctttcccgtaccatatgaatggggaaggcataatggatctcttaaaagagctgaaacgggaaacattttcgcgctatccgatcatgacggtcggcgaggcgaacggagtggcggcttgggaggcggctgattgggccggtgaagaacacggcgtctttcaaatgatttttcaatttgaacatctcggcctctgggatacggaagatgatcaaagcatctccattccggcgcttaagcgcgtcttgtccggctggcagaacagtcttgaaggaaagggctggaacgcgttatttatggagaaccacgatcagccccgttccgtctcggtatggggtgacgaacggtttttgacagaaagcgccaaggcactcgccgcgatgtatatgctgatgaaaggcacgccgtttatttaccaggggcaggagctcgggatgaccaatgtttcgtttccgtccattgaagattatgatgacgccgcaatgaaatatctgtatgaaaaagagacgtcccgcggcgttccgcatgaaaaagtgatgaagatcatctggaagaagggccgggataattcacggacaccgatgcaatggagcggtgaggcgaacggcgggttttctgatgcttctccgtggctcggagtgaatccgaaccacacatggctgaacgctgcatcacaaatgcaggatgaaacatccgtataccatttctacagacggctgctcgccctcagaaaagaacacagcgtattgatcagcggcacatatgaattgctgcttccgaatgaccggcagatttatgcctatctaagaaaaaacggaacaaaaaccgccctgatcatcacaaatctgtctaaaacccccgctttatacaagcatcccggttatccgcttgactccgatacgctcgtgctcgcaagcatggaaacaccaccgcatcggcatgtgacatcctttcttttaaagccttatgaggcccgcgtatatatatggtgaaaaacttcagtcccgaggctgaagttttttgtgatctgcgtttatcatcgcgatccgacaggaaaagacaaatacagaaacgaatatgggaaaggaagagaaaaagaaaggaggcattcatatgctgaaaaaaatgcagattcaaacaaacagacgggatgaaatgatcgacatcacacatgaagccgaagcgtttctccgcaaaacaggcgtgaaaaacggtttggcgctcatatactgtccccatacaaccgccggcattaccataaatgaaaatgccgatccggatgtgaagagggatatgctcagaaggtttgatgaaatgtatccgtgggagcacgaactggaccggcatatggagggaaatacggcggcacatatgaaagcgagtacaatcggcgcctcccagcatgtcatcatagaagacgggcgcatgatactcggaacatggcagggcgtttatttttgcgaatttgacggtccgcgaaacagaacatgttatatcaaaatacaggctgaaacggaggaaaacacaaatgagtgagtggatgagtgcattgtcattaacaaagcccgtcattcaagcgccgatggccggcgggctggtcacgccgcgtctggcttcggcggtatcgaatgaaggggcgctcggaagcctcgcttcaggatacgtcagcccgcaagcccttgaaaaacagcttatcgagatgaaagagctgacgaaccgctcctttcaagtaaatcttttcgttccggaagaaaggcagatgcctgaggcggaactggttgaaaaatggaaagcccgcatcccgagggcaaaagacgccaagccgttctctgatctgaaagaagaatggaatgatttcgaggaaaaagcggagcttctgatccgttacggagtcaaagcgtgttcattcaccttcggcctgccgccggaagcaacggcggaaaagctgaagaaaagcggatgtttccttttcggcacggcgacaacgccggaggaagcgaaggcttttgaagaacggggaatgaacgccgttatccttcagggaatagaagccggcggacatcgcgggtcgtttctgccggttaaaggagaaccggctctcggccttatggcgctgattccgcaggctaaagacgcgctgaatatcccggtgattgcggcaggcggcatttttgaccgccgcggcgtgcaggccgcccgctgtttgggtgcggacggcgttcaagtaggaacaccgtttctcctttgtgaagaaagcagcgcctcaccgggatatcaaaaagccattgccgattcaaaaggagccgacacgcggctgaccaccctgttttcgggaaaacaggcgcggggaatcgtgaatcagttcatgaaaacatatgaggctgacgagggaaatacgctgccttatccgctgcataatacgctgacaaagccgatgcgcgggcacgcggctcaatcaggagacgcggagtatatgtctttatgggccggccagtccgccgcgaaacttgaagggccgacagacgtgaaaaccgttttggaagaattgtgcgaatcataatccagaaatcgtgaggtgatggatgatgaagattcttcaaatgtcctacaaaaaaagagggactattgagtttgtctttgaagattttccgcattccaaagtcaccatggcgccgattaaagggtattactttgtccgcgccattaaatggagccgacgggacagagccgtcacccgacatgatttagagaagtttgaatgggctgcaaaccaagcgctcggcacgacggctttttaccggaaaagaaaagcattccgcatcccatcgtcacaatgacagacgatgggattgttttaatgcatgatctgataaagcgcgggtgcatcaagccttgttgcctggttaagcagataagccggctgcacggcatttttttttcttaaagaattcaatctctggatgatttgttcagcggtcagaatcccgagaccgtgggcgaaatattgatcattccccatcacaatgacattctctccccgccactgagcctttgcaggattaaaatcaggatttttaaaatataaacaatctccccgtaaaaagtggctgccggtttccgtgtagatcggcagatgctcatagtgccagtcatacaaagtgatatcccggaaacgccggttaaaccgttcttcaccgattgtctttaagacggccagataataaatcacaacaatggcggtagcgcattcaaatgcgtaaaacgccccgttttcaataatgtcccgaatcgcttttgaagcggggattctgtacttcagctccaaggctccttccggcgtcactctccaataagccgtatttccgtatgttttggcgaaagttgcaaatttcacacctgatccgtgcagttctcttgcggcttccacaatatggcggcgcagccgcacctcgaacatcagttcagcaatcgacccgtaatcgaattgtacgggagaattgagcagttcatttatatacggaacaaggctttcttccgtctgccagttcgcgatgtcctgaggacgaagcacttggccggatatgataatcatctgcgcgccccccttctctttttttataagatatgcaggaagcttgggcaatgaaaatcaagtcataaaaaaggaggaaatgttaacaaaatgtgaagactgagccgatatataaggtatcacacttgagggagcagcttaatatgaaaaaattcattaattggtgcacaaaggcatcgatttcacgtaaattaatcatttcatttatcgtgatcttaatcataccgattctcgtgttagaattcagttcataccatacggcgagcaattcgctggatgatcagatttcaggcaacgcgaaaaataacatcgaatcttttaacacaaccattacaaatgatatcggctcaaaagcaaaggcgattgaatttttcagtgaaacgttaaaaggatcatccttctcaaagaaaaacatgtctgctcttgaagaaaagttcgggcaatacacgtctattcataaggacgtagcccgcgtttacggaggaaccgaagacggcagctacgcacaggcgccgaaggagaatactccggccgattacgatccgagaacacgcacttggtataaagacgctgtgaaggccggcggcacgctcgttgtcaccgacccttacaccgcggcaagcgacggcagcatggtcgttaccgtggcaaagcagatgcaggacggaacaggcgtagtggccatggatattacgattgaccagctgctgaagcagatgcagggaatcaaaatcggacaaaaaggattcgtgtttatcacgtccaaaaataaaacctatgtcgcgcataaagaccacaaaccgggcgataaagtttcaaccccgtggctgaatgaggtatacagcaaagacagcggcattatttcatacaagctcgatgatcaaaataaaaaaatggcgtttacgacaaataaactgaccggatggaaaatagaagggagcatggagctcaacgaaattaaagacgcctcacaaccggtgctgacgatggggatgatcgtccttgcagcatccattatcatcgggggaattttaattctgttgattgtcagatccattacgtcaccgctgaaacggcttgtccgctcttctaaacaaatcagcggcggagacttgactgaaaccattgatatccgctcgaaagatgaattgggcgaactcggcgcgagctttaatgaaatgggagaatctctgcgcggactgatcagcgcgattcaaaactctgtcgacaacgtggccgcgtcatcggaggagctgaccgcttcagcttcgcagacaagcaaagcgacggaacatattacaatggccattgagcagttttcaaacggaaacgaagagcaaagcgaaaaagtcgattcaagctcagccaagctgaatcatataaatgacggactcaccgccgtttcccgcacatcatcatccattacggaagcatctaaacaatcgaaggaagctgccggcaccggggaagaatatgtgcagcaaaccgtcgggcagatgaatctcatcaatcaatcggtccagcaggcggaagcggttgtaaaaggccttgaggccaaatcaaaagacatcactcatattttaagagtcatcaacggtattgccgatcagacaaacctgcttgctttaaatgcagccattgaagcggcaagagccggtgaatacgggcggggcttctcagtggtagccgaagaagtgcgcaagcttgccgtccaatccgccggttctgccaaagagattgaaaaactcattcaggaaattacggctgagattaatacatcacttcacatgttcacatccgttaatgaagaagttcaatcaggacttgccgtgacggaccgcacgaaagaaagcttccagaatatcttcggcatgacaaacgatatcgccgagaagcttcaatcgatgaacggcacggttgaacagctgtcagacagctcccagcacgtttcagccgcagtgacggatattgcggacgtatctagggaaagcgcagcaagcattcaggatattgccgcatccgcagaagaacagcttgcatcaatggaagaaatcagcacatccgccgatactttggcgcaaatggccgaagaactgcgggaattaacgaaacaatttaaaatcaactagtaaaaaaggacgctttccggagggaaggcgtccttttttatagtgacagccggataattaaataaaaagtcttgcatgcaaagggagtacatagaactatttttcatttatgacttaattttcaatgtaataaaaagggagtcggccgatataaacagtaaatgattgaaagaggtttacaaaattgaaaaaaacagcaaaaaaaatcgccagaaaatcaatagccaaaaaactgatcatttcatttttactgatcttaatcattccggtagcagtattggctgccggcgcctaccgttcggcggcttcatccgttgaaaagcaaatgatggaaagcgccgaaggaaatgtgcaaatcttaaacaatatgattgatgaccggatcggaatgtttacaaaaagctcagcatatttcagcgaatgggcgacaagcgctaaatttaaagaaaaaaaccaaacggaaatgcaagaaaggttcaaacagtttattgaaagcaatgataaagcgtccgccgtattttcaagcagcaaggaaggaacgtttacccgttatccgcatgccgatatgccggccgatttcaatccgcttgaaagaagctggtatcaggaagctatggagaataaaggccaaaccatcatcacagacccttatgagtccatctcaaacaaaaagatggtcgtcaccatggcccgcgcggcgcaagacggatcaggcgtcgtcgccattgatataaaaatcgacgatctcatcacgatgacaaaagaagtgaacatcggaaaagaaggatacgcctttatcctcagcaaaaataaaaaagccgttgcctacagtgatgaaaaagccggctcggcggtatcgggaaaatgggttgatacattattcagcgggcaaaaaggcgactttgaatatacgctgaacgggaaagcgaaaaaaatggcgtacgtgaccaatgaagcgacgggctggaagatcagcggaaccatgtccgtggaagaaatcaaagatgcggcaagaccggttctgactctggccgttatcatactggcgatagccattgccgcagggatgattttcatttattttgtcatccgctcaattaccaaaccgttaaaacgtctcgtagcttcagcggaaaaaatcagcagcggagatctgacggaaaccattgatgtcagctctcaagatgagctgggcgtgctcggtaaaagttttaatcatatgacagattcactccgttcgcttattcagggaattcaggactctgttgaacatgtcgcttcttcctcagaggagctgacggcttcggctgagcagacgagcaaagcaacggaacatatcacccttgcgattgaacagttttctaatggaacggaagaccaaagtgagagtattgataaagcgacagcccaagtgaatgagatgaaagacgggctcagcgatctggcggaagcggcagccgtggtgacggaaacgtcaattgaatcggcggagatatccggcgccggtgagcggcttgtcaagaaaacagcgggccagatgggcgccattgaccaatccgtaagtaaagcggagcaagtcgtacaagggcttgaactcaaatcgcaggacattaccagcattttgcgcgtcattaacggcattgccgatcaaacgaatctccttgctttaaatgcagccattgaagcggcaagagcgggagaatacggacgcggtttttcagtcgttgccgaagaagtgagaaagcttgccgtacaatccgccgattcagcgaaagaaatcgaatccttaattcatgaaatcgtcaaagaaattcatacttcgctcggaatgctggaatccgtcaatcacgaggtgaaaagcggacttcagttaacggacgaaacggaaaaaagcttccgggacatttccgttaaaacaaatcagattgccggtgaactgcaaaatatgaatgcaaccgtggaacagctttctgccgggtctcaggaagtatcaaacgcttcagaggatatcgcggccgtctccagacaaagcgcggccggcattcaggacatcgcggcttcagctgaagagcagcttgcgtccatggaggaaatcagttcctccgccgtcacgctggaaaaaatggcggaagaattacgcgaactgacaaagcgttttaagataaactcttaattaagtctaaaagactaattttaagataggtaaaaagtatgtttcgttatatttcttctttttggatgtgtataattacccataattgccgatatgaagggtaaacacgcaagaggagatatagcagatgaaaaaaattgtgcaaatcatcaagcagagatcgcttacaagaaaactgctcatttcttttttggccattctcattcttcctatttcaacgctggcttttatcgcctatcaatcggcggtaagcacgcttgacaggcagatgatgggaagcgcactagataatgtgcagcagattaacgatatgatcaacacaagcatcagccaaaaggaagacggaacggcatatttcagcgactggctcacaaaggatcggtacaagccgaaaaaccaatcgcaaattaccgataaattcacagagtacatgaagatcaataaagacgtggaatccatttatacgagtgacacggaaggacatttcacacggtatccggatctgcagatgcctaaaggatataatccgcttgaaagagactggtataaaaaggccgtggaaaataaggggaaagttgttgtaacagatccttaccgcacggcttccaccaatacgatggtcgtgacggtcgttcagcagacgaaagacggctcaggagtcgtcgccatcaatatgaaaatcgatgagcttctgaaaacgacaaagaaagtgaacatcggaaaatcaggctacgcttttatcctgacgaaagacaaaaaagtggtcgcccacccgaaccgcacgtcaggcacagtattaaacggggagtgggctgaacagctgttcaccagcaaaaaaggtgattttcaatacaaatacgacggccaggaaaagaaaatggcttatgatacaaacgggctgacaggctggaagattaccggaacgatgtatctggacgaaattcatgaagcggccctgccgatccttcatctgtccctgctcgttctcgtattagcgattgtgatcggaaccatcgtcatggtgctgattatccgttcaatcacaaaaccgctcaagcagcttgtgacatcatcgaaacagatcagtgaaggcgacttaacagaaacgatcgagattcagtcaaaagatgaattaggcgagcttggcaaaagctttaacaatatggccgcttcactcaggtctctcatccatgccatccaggattccgtgaataacgtcgcatcttcctcagaggagctgacggcttcagcggagcagacaagcaaggcaaccgaacatatcacactggcgatcgaacaattttctaacggaaatgaaagccaaagtgaaaacattgaaagcgcggcggaacatatttaccaaatgaacagcgggcttaaagatatggcgaaagcatctgccgtcattaccgaatcctccgccacatcagcggaagtcgccaattcaggcggaaagctcgtccaccagacggtcggccaaatgaacgtcattgaccggtcagtgaaagaagctgaacaagtggtgcgcggacttgaaacaaaatcaaaagacattacaaacattctccgtgtcattaacggaatcgctgaccagacaaaccttcttgcgctgaacgcggcaattgaagccgcacgtgcgggtgaatacgggcggggcttctcagtcgtcgccgaagaggtcagaaaacttgcggtccagtctgccgattcagcgaaagaaatcgaaagcttaatcatagaaatcgtcaacgaaatcaatacatctctcggcatgttccaatccgtcaacaaagaggtggagagcggactggatattacgaatcagaccgaaacgagcttcaaacggatttctgaaatgacgaaccagatcgccggagaaattcaaaatatgaatgcgacggtagaacagctgacagcaggctctcagcagatttcaggagcttctgagcaaatcgcgtccatcgcaaaagaaagctccgccagcattcaggatattgcggcctccgccgaagaacagctggcttcaatggaagaaatcagttcgtcttcggaaacgttatcccaaatggcggaagaattacgtgatatgacgaaacgatttaaaatagattaataggtcatagaacacccaaatgtgctgtttgggtgttttttttagtttttttaataaatcttttgtcctatctgacgatattagatttagcttttcaaagaaggagactgaaaaaatgaaacaactgatacattggatcaaacagccatccatcagcaagccgctgatcgcggcatttttagccgtattggtgcttccggtcggcatactcgcctacttcagctaccaaacggcggggagtacattagaaagcgaactgacccacagcgcccagggaaatgtcagtgaactgaacagcgtgctggaaaacatgcttgagggtaagctgaaagcgattgactacttcagcgaatcaatcacaaaggaaaaactgaacacaaaaaataaatcggtactgcttgacaacatgaagcagtatgtcaccgtaaatgacgatgtcgcgtcaatttacgccgcgtctcgcgacaaagcgttcgtgaaatatccgtccgttgatatgccgtccgattataatccgctcacgcgcgagtggtataccaaagcggttgaaaaaagcggacagccggtgtttaccgagccctataaagacgctgcaaccggacagacggttgttacgattgcccagcagacaaaagacggatcaggcgttgtggcgcttgatattaatcttggcgacctgctgaacgcttccgaacgcgtccagatcggtcataaaggttttgccttcattacaacgggagataaaaaatacatcgcgcatccgactataaaagcgggaacggaaggctccggagagtggacggaagaagtattttccaaatcaagcggatcgtttgaatacatgtttgaaggacagcagaagaaaatggccttcacgacaaacaaactgacgggctggaaaatcgccggcacattttttgtcagtgagatccatgacgcagcctcgcctgtcatgaaaatggcgctgatcatcctggcggtttctcttatcgtcggcggtattttaatcgtttttatcattcgctcgattgcaaaaccgctcaaaaaacttgtttcgacatcagctaaaatcagtgacggcgatttaacggaagtcattgacatcaagtcgaaaaatgaattcgggcagctcagccaaagcttcaatgagatgtcggcgtcactccggtctgtcatcggcgtcatccagtcatccgtcgaacatgtcgcttcttcatccgaagagctgacggcatccgccggacagacaagcaaggcgacagagcatattacactggcgattgaacaattctcaaacggaaacgaatcacaaagcgagaaattggaagaaagtgctgatcacctttcccaaatgaatgcgggcattgccgagacggcgaatgtatcggcggaaatcactgaatccgccatccaaacctctgaaacggccggaagcggagaagaattagtggcgaaaacggtcggccagatgaaaacaattgatcgttccgtacagcaggcggaagcggtcgtaaaagggctggaaacgaagtcgcacgacattaagagcatcctcaacgtcattaacggcattgccgatcaaacaaatctgcttgccttaaacgctgccattgaagcggccagagcaggcgaatacgggcggggcttctccgtcgttgcggaagaagtgagaaagcttgccgtacaatcagccggctccgcgaaggaaatcgaaacgctgattcaggaaatcgtcaaagaaatcgccacatcgctttccgtattccaagcggtgaatcaagatgtgaaggaaggcctcgatattacggatcagacggccgaaagcttcaaaaaaatctcagaaatgacgactcagatttcaggcgccttgcagcatatgaacggaacgcttgagaagcttgcagccgggtcgcaaaatgtgacaaacgcggtggaggacattacctcagtcgccaaagaagggtccgccggcattcaagacatcgccgcctcagctgaagagcagctggcctccatggaagaaatcagttcatccgccgaaacgcttgcgcatatggctgaagaactgcagcaggtcacacggaaatttacgattcagtctgaagacgaagaacagctgtagcgagctgtttcttttcctcattttaaaaaagcgatacactagtataaaagaagggagtggcagtgatgagattagaaggcaaaaaagtcatagcgcttgtcagtgacgattttgaagacttagagctttggtatcccgtctaccggctgagagaggaaggcgcgatcgttcatttaataggagaagaagcgggccgttcatacaaaggaaaatacggcgtgcccgcgacggcggattacgattttaagagcctgattattcaggagtatgacgccgtgctcgtgcctggcggctgggctcctgacaaactgcgaagatatcccgaagttttggacatcatccgtacgatgaacgagcagaaaaagccgatcggccagatctgccatgcgggctgggtgctcatatctgccggaattctcgcaggaaaaaaagtaacgagcacgcccggcatcaaagacgacatgacaaatgcaggggcacagtggctggatgaagctgtcgtaactgacggacacattgtatcaagccgccgcccgcccgaccttccgcagtatgcaaaagcgtttgctgacctgttagcgtccaaataaaaaacatccgcccgaatccgggcggatgtttttagttttgatcggcgggaaagacaattccgatttgttttctcgcttcttccataatgcttgccgtaatgaaagaacgttcaaatgtattttcggaagactcccgctgtccgtttcgaagaagattgatgaattcagccgtttcgtagtacatcgatggtttcagatcagggactgaaatgtcttccgtccggccgtcacgatagcggatttccgcccgttccggtccgtgaatgctgtccagaacgatcgtgccgtcttcaccctgaatttccgccggggcaaacgaatttgagattttcgaatgcatcagcaccgcttcaaatccgtcgtatgacagaatgaccgtgccttcgccgtcaacgccggatgctagtttatgaccggtcgcaatgacgtttttcggtttgccgaacaggacgacggccggataaatgcagtacacgccgatgtccattaacgaaccgttcgataattcaggcttaaacgcgtttagcaccgtaccgttcttatatgcatcatatcgtgatgaatattggcagtagcttgctgtgaatctcctgacgggtccgattttatgtaagtggttttgaagcatgctgaagttcggcaggaacgttgttttcatggcttccatcaagagaacgccgttcgttttggctgcgtgaatcatttcatccgtttcccttgcgttagacgcaaacggtttttcgcacagtacatgcttgccgtgttccataaaaaggaccgcctgctctttgtgaaatgcattcgggctggcgagatacaccgcgtcataggctttgctttccgccatttctttcaggctggtgaaataatgagcagcgccgtgtttgccggcgaattccgccgcgcgttcctcagttctggaataaaccgccgttaattgaaaatcatcaatagcagaagccgcctccagaaatcgttctgtaatccaattcgttccgactgttgcaaatcgaatcattgctatcgctccttctatgtattggcttacattatagctttttttctgagaaacataaatggaaaaaaggctgccagctaaagggataggaaaaattcccatagagaccggttattatttttcattacaggaacgatagtgtacaatttaagtaaaatacatatgatggaggaacaatagtggaaacattgcaaacatggggcggcagatttaaacagtttttcttagacaataaatttgtcttgtttttgcttgtattgctgctcatcggtctcaatatccttgtctttatgaagacatcatttattttcacacctattatcgtcctgctcaaaacgattgcgctccccgtcattttgacaggaattgtttattatctgcttaatccgatcgtagatatattggaaaaaataagagtgaaaagagtctattccatcctgctcctttacctcattattatagggctgattacgattacggtcgtttcaattattccgtttttaaaggaacagatcatgagcctgatcgacaatctgccgaaatatgtggatatcgttgaagatcagacgaaaagcctgatcggaagcgattttgtaaatcaggcgcaaaagacgatgaatatcaacatttccgatcttgctaataaagtatcggcgcaggcggcgacaattgcaaacagcacatttaccggagtcgggaattttatcggcgcgctgacggaagtaattatttcaattgtgaccgtgccgtttattctgttctatttgctgaaagacggcaaaaaactgccgatttatatcttaaagtttgtgcccacccgtctgaaagaacaaacgtatacgatgcttagtgaaatgaaccacagattaagttcctatatcagaggacaggtcatcgtcagcttctgcatcgggtttttattatttatcggctatctgattatcggacttgattatgcgtcactgcttgcggtcattgccgcttgtacgagcgttgttccgtatttagggccgaccattgccatcacgccggcgattattatcgcgttggtcacttcgccccttatgctgctgaagcttgcgattgtatggaccgttgtccagctcgtggaagggaaattaatttcgccgcagatcatggggaaaaatcttcacattcacccgattaccatcatctttgttcttttaaccgccggaaagctgttcggggttgtcggcattattttagccatcccggggtatgcggtcatcaaagtggtcacgacccatctgtttgattggttcaaaatgcgttcgcatttatatgaagaagaaaaaaatgatgctggatcgaagtcataaaatcggaacggatatgatatttattataagacaggctttccttcagaggagagcttctcttttgtaaatgatgaatgaagggaagaatgggatgacactatgggagatgttcacagcagccgttttgggaatcgtggaagggctgacggagtatgcgccggtttcttccacgggacatatgatcatagcggatgacatctggctgaaatccggaagcctgatgaatccggaagccgccaattccttcaaagtggtgattcagctcggttcgattctggcggtggccattgtgtttaaggatcggatattacatttactcggcctcaaaaaaaacgtcacgcgcgatcagcagaagggatacaggctgaccatcgcgcaaatcgccgtcggtcttgttccggcggcggtgctcggctttttatttgaggatttcattgaccgctatttattctccgtcagaacggtcgcttacggattaattgccggagccgtgcttatgcttatagcggactggatcaataaaaggaaagaaacgatcgatacggtagacagaatcacctacaaacaggctttctgtgtcggattattccagtgtctcgccttatggcccggattttcccgctcaggctcaacgattgccggaggtgtcattgtcggcttgaatcaccgggcagccgcagacttcacctttattatggctattccgattatggcgggcgcaagccttctgaagctggtgaaatactggagcagtctttcttatgacatgattccgttttttctagtcggctttatctgcgcctttgtcgtcgccctcttagtcgtcaagttttttcttcggcttattaaccggattaagcttgtcccgttcgccatttaccgtgtcatcctcggcatcattttaatcatgctcgtgcgataaacgaagaggccccccggagggtcttctttttatgttcgaaaaacgtctcaggaaaatatgagcaaactgaattttctgcttgaaattcatagaagactcgtctataataaaacatgacgttacagcacggggccatagctcagctgggagagcgctacgctggcagcgtagaggtcaggggttcgagcccccttggctccatacctttaaacccttattctataaataagggtttttttgttttttcatcttctgcggcagcctctatgttctgcttcatttctaacaactcaaaataaaggaaagagagaaaatgaaaaagaaaatctatcttctactaactctttcagcggcactggcacttcttttaacagcgctcccggctctttctcccgtcgtcttcacgtctgcttcagaaaaaggagccatcaggcatgacatttataaaaaaggatatccgtatcaaagctactttgcgattcttcgaaaagaagaaggcggcggagaggccgggaacctttattatgtaaattggttcaattggaaagatgataccggacagacgccgcacgtatgttattcaaaaaaatcgtccgaaggcgagtacaaagtaagctgcggaaccggaccgtaatgatcaagagcccctcttcaatgaggggctctttctgtcaatgccgctctggctctccgtttaatatccccaatataacggcgtatcataatgccgatacggatcattcggataatgcgtatttggctgataaggcgtattcatatcatgaatccccgtgttttcagtctgtccgcagtatttatcggggcctatcacagttgattgccggatcggtgaaacggctttttcccactcatgctcattcagacagtacgtatgcgccatgatctcaggcggcgtcagacggagaatatccgagccgtatatcacttcaggcgaaggggcgtcaaatatggccaaaaggtgggttttgtctgaagtggcgacttcataatgccaccacccctgcggaacattcgccacttgtcctgaagagatcggataattccgtattttctgggtgaacggattcagcatcgacaccaccgcggaacccgaaatacagtacaccaattcagcggcgttttgatgggtatgcggttcaatcacatttgttttgctcagaaagatatctaataatgaaatattttcaagcgtgtttaactgtttaatccccaatacattgataaagttccgagcatctttcgtaaaaaaacggctctcattcacatcataagtgaactgtgtattcggagacgtgtaatcgatatcggaaaccatgcactcccccgctttcatctttaaacgtatattcccaaatatatgtgtccctgtttcaccgggtgataaaaaaaggaggtgaaatccataaattccaaatccaacacaatattgtgacgacttttttaaagattcattttcaatatatcttttattcgaaatatctcttactataaagatatattgaaaatacatctttagaagggttgaggattaacatgctggatgagagaacaatagacatcatcaaaagcacagtacccgtattgaaaacacatggagaaaacatcaccggacgcttttataacctgatgtttcaagatcatcccgaactgttaaatatgtttaaccaaacgaaccaaaagaaacagactcagcgcgcagcattggcaaatgcagtcattgcggctgcggcgaatattgatcaattagaacaaatcattccggcggtcagacagatcggccataaacacacaagcatcggtgtaaaaccggaacattatccgattgtcggaaagtatctgcttctggcaattaaggatgtgctgcaggatgccgcaactcctgagattatgcaggcatgggaaaaagcttacggtgttattgcggaggctttcatcggcattgaaaaagacatgtacaatgaagccggatggcaggggtataaagaatttacggttatacagaaaacgaaagaaagcaaagatattacatcattttatatcaaaccgagtgacggctcttcgcttcctggatttgaagcgggacaatatatcagcattaaagtgcggattgcggattctccttatacgcacattcgccagtacagcctgtctgatgcttctcaaaaaggggcatatcggatttctgtgaaaaaggacggagcggtttcttctcatctccacaatgaagttcaagagggagataaacttgaagtcagcgcacccgccggggatttcaagctgtcttctgccgaaaaaccggttgttcttatcagtgccggctccggaatcacgccgatgatgagcatgctgaaaacagccaccgaaaaacagccggagcgttccgttacttttattcatgccgcgaaaaacggagagtacgccgcgttccgcaaagaggctgaacaagctgcggagaatcatccgaatattaacattatttatgtatacagtgaaccggcagaacaagaccgctcaggagacaagcctttttacagcggcaggattgatcaaaccttcttggagcagcttcatctgaatcaagatgctgaatgttacttgtgcggatcagcgcagtttatgacgcaaatgaaagatatgattcttgccctcgggtttgactctgattccgttcaatatgaattgttcggccctcagctgagcatggcataaccaaaaagactcctcaaagaggagtcttttttatttgcgcaatatgttctttctccgtctttttccctattttattgaaattttcatcaatgaccagtaaaattataaatctagtgattccggaattaaaggaaggttgatatgaaaaagaaagcaaagaccaaaagggggcttgggtgcctttttgctgtatctcttatattcggattatttctggtatcaatggtgttttcgaaattcatagtgacggaagaaaaaccgcctgaagaggtggacgagcagcaggtctttattgacagcctttccgggcatgctcagattttatatgagaaatatcatgtccttccgagcatcaccctcgcacaggccattctcgaatcggactgggggaacagtgagcttgcggggaaagcgcgcaacctgttcggtgtaaaaggtgattataaaggaaaacacgtcacgatgaaaacggatgaatttgaaaaaggaaaacgaaaaacgattcgggcaaaattccgtaaatacagcacgttttttgaatcaatggatgaccatgccaaattatttgtcaacggaacgtcttggaataaaaagaagtataagcctgtcattgaagcggacaattataaaacagcggtggctgcccttcaaaaatccggctacgccacagaccccggctatgctgaaaaaattaaagatgtcatagaaacctataacctgaatgaatatgacaaaatcaatgcctctcttaaagcagttgatatgaaaggcgccatcaaagaccacgccattgaagacgtgtggtccaagccgtcaaaagagcggcattctattaaactggcatcggcgcaaaagtttaccggccagcatattaaagtcgtatctgaaaaacaaaacggagaatccgtctggtaccaaattcaagtgaaagatgagctgatcggctgggttgaccaaaccgccgtccagttaagtgaagaaacataagcatcaaaaaaagccggcagcccgccggcttttttacattccttcagtttcaaaccttttaatatcacgtttatgccccatcagcacaaggcagtcacattcatgaatgacagtctccggagaaggggacagctgaatgtctccgttatgtttcaaggcgagaatggtgcagccgaatctggcccggacgccaagatcaagaatggattttaaatgcagctttttcgtggctgaaagctccacgatgctgtattcatctgacaaatcaatataatttaagacgttttcatccgaaaggctttgcgcaatccgcacgcccatatccttttcaggatggataatacgatcagcaccgatcttttcaagcactttgtgatgataatagctttgcgctttcacccaaatattagggatgttcagctccttcaataacagcgtcgtcagcgtgcttgcctgaatgttggcgccgattgctacgatgacatattcaaaatttctgatgccgagcgactgaagctcgctttcttccgttgaatttgcccgcacagcatgcgtggcataagaggagtatgcgttgacccgctcttcgctgatatcgaccgcaagcacctcatgccccattttaaaaagctctttacagatgcttccgccgaaacggccgagtccgatgacggcaaattgtttatttttgatttttcccaatcctcataactccttaagaaactgttttcgtcactccaaatacaacaaacaagaatgtactcctgtttcaagggtttgtcaatgcgagggccggaagaaagaaaacagcacaaaaaaagaccggctgacaagcgatgggcttgtgccggtccgtttttcgcaattatttgcagttgcaaggctgtgtcggcggtgtgctgcgtttttgaacaacaattgtgtcctcagcatagaatttagagccgatgcttaatgatttattttctgcacggaacttatatgtacctgcagcaggcaatgttttattattaagagaaagcttgaattccgctgcgccgagcaaatcaatgtttaacggaagtctgactgttttgccgttattcagaatctgtctttcacgcaaagcgtgtccgttgactgtatcttttgttgtagccgcaaatccgctaggaagggtaaattccataacgcctaagctcaggatcgtgttcggacggtacgtcaattcgatatcagaaaatgaccattcctgctggctggcacctgtatattttgcaaataaggtagcagtcgctttcgtggacatttccggctcgtgaacggttgagcctgactcagcggcgaatgacgctgtcggcagagaaagaagcaaaaccaggccgaataaacttgccatgacagttgagaaaaatttctgtttcattttcataaatccccctaaaaaaaatttgctggttgttcttaaaaaagaacgactatacctataaaaatttaccatcaattttaatggaagtaaatggggttatgttcctatattttctcaaaaataatcaaatcacgacaaaaaacgcctgattttgattcaggcgtttttttcgtccgtttctatcggaataaatttaaaaatctccccgctctgaaccgagtcagcgagacgcttcagccaatgataataagctttcgaactttcaagctgatcatataactgccgcgcttcttcctgtaattccgcgttgccttcctcggccagcaaaacggactgcaaatccgcctgggcctgttcgatggcggacaaattcacctgaacttcacgatcccatttcggcgggaagaaattcgtgaaaaacgtaaagaaatctttttccgctacaaacgtatgcttccgtgtgccgcggtgaaaggtttttttgaccacatttaaatcctgcagctttttgacgcctgtgctcatactcggtttgctcatctgcagttcctcgcgcatttcgtcaagcgtcatttcatccctcatatacattgttccgtataaaatcccgacactccgggtgattccgtaaagatccatcgtctctgcaatggaatcaatgacaagatccctggcttgttctatagctgcgaattctggattctcatccatactgtccctcttttcctcttgaagtttaaatttgttaagtcatttctttatgttcttaatcttaacgaatcatgacaaaatgtcaaaatctaaacggactgaccgggttttgacaggcaaaaaaacatatgttaaattaatattgttaaaaacattaaatttttatttaacaaacttacttttcggtaaggaggactcttatgagcaaaacgctttatatcggcggcgaatggatcagtgcagaaaaaaaacagacccgccgtatcattaatccatttaatcaagaagaaattgcaacggtatgcgaaggagaccgggatgatgcggtgaaagccatcgccgcagccagaaaagcatttgatgaaggggagtggccggtgctttccgggctcgagcgcggacaatttgttctgaaaattgcggaattaatcagacgcgatctgaacgaattagctgagctggaatcgctcgatacaggaaaaacgattgaagaaagtaaagccgatatggatgatatcgcaaatgtatttcaatattatgccggtttggcggataaagacggaggcgaggtcatttcatctccgattcccgattccgtaagtaaaatcgtcagagagcccattggcgtatgcggacaaattacgccgtggaactatccgctccttcaggcgagctggaaaatcgctcccgctcttgcggccggaaacacgatcgttttaaagccgagcgagattactccgctgacaaccattaaagtctttcaattaatagaagaagccggtattccgaagggggtcgccaatctcgtgctggggccgggcgcctctgtcggcgacgagctggcgagaaacctcgacgtcgatttggtctcttttacgggcggaattgaaacaggcaaaaaaatcatgcaggcggcaagcggcaatgtgaaaaagattgctctggagcttggcggcaaaaatccgaatatcgtattccaagatgcagatctcgaaacagctgcagatcaagcgctgaacgccgtgtttttccatgccggccaagtatgttcggcagggtcccgtcttttggtggacgaagccattcatgatgaatttttagccgagctgatcaagcgcacgaaacgcatcaaattaggaaacggttttcatgaagatacggaaagcggtccgctgatttccgccgagcatcgggccaaagtcgaaaaatacgtagaaatcggcatcgaagaaggggcaaaactggaaacaggcggcaaacgtcctgatgatcccgcccttcaaaacggtttcttctatgaacctactattttctcaaactgcaagtctgatatgcggatagtccaagaggagatcttcggccccgttttaacagttgagtcattttcttctgaagaagaagtgatcagacttgccaacgataccatttacgggctggccggagcggtatggtcaaaggatattgaaaaatgcgaacgcgtagccgccaaactgcggatgggaacggtatggatcaatgatttccacccgtatttcgcgcaagcgccatggggcgggtacaaacaatcgggcttcggccgcgaactcggcaaaatcggtctggaagaatacacggaaatcaaacatatttaccgcaacacgaaaccagcggctgtaaactggtttcaagcataacgaggaggagatacaatatgacattaaatatgaaagtagaaagcatgcataaattccatacattcgaaatcccgacagtcattaaacacggaatcggtgcgattcagcacgcgggaagtgaagtcagagcgcttggcgtcacaaaagcgctgctcgtaacagacccgggaatttataacgcgggagtggcaaacccggtcattgaatctttgcaggaagcgggcatcgaagtcgtcctgtttaacaaagtggagccgaacccgcctgtacgtcttgtaaacgaaggatcagaactgtataaaaaagaaaactgcaacggccttgtggctgttggcggcggaagctccatggatacagcgaaagcgatcggggtagaagcgacacacgaaggaagcgtgcttgattatgaagccgcggaaggcaaaaagccgctggaaaaccgtattcctccgctgacaacgatcccgacgactgcgggaacaggttcagaggtcacacaatgggcggtcattacagatgaagaaagagaatttaaattcaatacgggcggaccgcttatcgccgcgcatttaacggtcattgaccctgagctgcacacgtccatgcctccgcatgtgacggccatgacaggtattgacgcacttgcgcacgccatcgagtgctatacgatgaaattcgcgcagccgatcactgatgccgtcgctttaatggccattgaatatgcggcgcattatattaagcgcgcgtttgcggacggagaggatttggaagcaagatacggcatggcgcaggcggcgatgcttgccggcctttcatacggcagtgaatcagcaggcgcggcgcatgcgatgagccagacgctcggcggcatcatccctgtcgctcacggacaatgcgtcgcagctatgatggggccggtaatggaatacaactggaaaggctatccggaaaaattcgcccgcatcgccaaagcattcggaatcgatacaagcaacatgacaaccgaagaagcggcaaaagcgtccgtcaactggatgtatgatcttgtaaaagatttagaggtgccgagtttagaagaacaaggtgtgtctccggacatgattgaacgtttatcaaaagaagccatgaaagatccgcaaactttcggaaatccaagagatttgaatgagaaagcatacaactggatttacaaacgctgctttgacttaacgccgaaaacggtataataaatgaaccctgctcctttacagagcggggttttttaaggataatgtcaagaaaaaggcggtggcggctgatgtggaaacgcataacagcaaagacggaaggcgtatatatagcggataccgaacaatttgttaccaaaaagatggacaagcttcgtgcggaatacggcgggtttcccggtgacctgcatttcggactgacaaaaaaggccggcgcgcgtgagccgatgtatgaaagaggaacagaaatttttaaccggagacagatttcaatcgtgtccatggaggaatgtgatgacattgcggagaagatggggatttctcatatctttcccgaatggctcggcgctaatatcgcaatcagcggtttttctgcactgacgccgcttaaggaaggaagcagaatgatatttccgagcggtgcgtctctgttgtgcgagggagaaaatgatccgtgcattcagccgggagaagtcattcaatccttttatccggatcagccaaaactcgccgcggcgtttgtgaggcacgcgatgggcagaagaggaattgtctgtattgttgaacgcccgggtgacatatgcacgggcgatgcggtcaccatccattcttatgaaccgaaacgcgccaagaaaaaaatcgagaaggtctgactcagaccttttcgattttttgtttgatttcttttatttgattaatgtgacgcttttcatgatggccgataaaatcaatccactggcggatcgtcagttcttgaaaaacaggatgcggaagcacacgttctaagtcttcctcgtttaatgatgaaataactgcggtcagctgctgtcttgccgtatctaattcttgttttgcttcaatgactgatattcggttttgctcaggttcgaggtgtgacggcgccggccgtttatctgttctgtcctctataaactccatcggtttttcttctatttcttttaacggtgcgtcttttgcctgctttgataaaagggtctgcgctgtttcgtcaattttctttaaatggtcaaggacttcccgcacgctccactcatcagccgcgggctttcggttgaattcctcatcagagagtcctttcagttcttcccagatctgctgtctggcttcattaaaaatgctcatcctatctcctcctttagagtaaacatatcatatccggattggataatcatgtaatcagccttccttatcagaaaattgaaaccatttacctttacatccgtatataaagtaacactccgacacctcggccgaaaggaggatagaagatggacatatttcatctgccgcttgaaacggtctatctttacacattgattatttcgggaagtctcacgcttttgattctgttttttcaagatgtgtttcacggcctctcggaagctattcctgtttcatttttaaaccctgcattgattctgtcttttttaacaatcttttcagcctcaggttatatcggcgaaatcgccgctccgctatcaagttctgtcattgcgttgctttcatttgttctttcggttcttttggtcagcctgcttcacttcttcgtccttgtcccgctttcatcagcggaagaatcgctcgcttatcgggagacggatttaaagggcagagtcggcagggtcattacttccgtcccgaaagacggctatggggaagtgatcatagagggaatagggggcgccatttctaaatctgccgtcagctttgatcaagaacagatcaagtacggaacggccgtattagtgattgacgtgaaagacggagtgctttttgtgacgccgcatgaaccaatctgatatctaagggggaactgttatgactatgccgattatcattgttatcggaatcgtattctttttactcatcgcacttattgctgtatttattacgaagtaccggacggcggggccggacgaagcccttatcgtgaccggaagttatttgggaaataagaacgtccacattgatgaaggcggaaatcgtctgaaaatcgtccggggcgggggaacgttcgtgctcccggtattccagcaggcagaacctctcagtttactgtcaagcaaacttgatgtctctacacctgaagtctatacagaacaaggcgtgccggtaatggccgacggaaccgccattattaaaatcggaggctctatcagtgaaatcgcaacagcagctgaacaatttttggggaaatctaaggaagaccgtgagcaggaggcgcgggaggtgctggaaggccatctgcgctccatcctcggctccatgaccgttgaagagatttataaaaacagggaaaagttttctcaggaagtccagcgggtcgcgtctcaggatcttgctaaaatggggctcgtgatcgtttcttttacgattaaagacgtccgcgataaaaacggctatcttgaatcattaggtaagccgagaatcgcccaagtcaagcgggatgcggacattgccacggcagaagcggataaagagacgaggattaaacgtgcggccgctgataaagacgcaaaaaaatcagagctggagcgggcgacggaaatagctgaagcggaaaaaatcaatcagctgaaaatggcggagtacagaagagagcaggatacagcaaaagccaatgccgaccaggcatatgatcttgaaacagcaaaagcccgccagcaggtgacagagcaggaaatgcaaattaaaattattgagcggcaaaagcagattgaattggaggaaaaagaaattctgcgccgtgagcgccaatatgactctgaagtgaagaaaaaagccgatgccgaccgttactcggtggaacaagcggccgaagccgcaaaagcgaagcaactcgcggaagcggatgccgagcagtacagcatcgaagcgatggccaaggcggaagcggaacgcgtgagaattgacggtcttgctaaagcggaggctgaaaaggcgagaggagaaaccgaagcggaagtcatccgcctgaaaggtctcgcagaagcggaagctaaagaaaaaatcgccgaagcattcgaaaaatacgggcaggctgcaatccttgatatgattgtgaaaatgctgcctgaatatgcgaagcaagtctcagcgcctctttccaacattgataaaataaccgtcgttgatacgggaggaagcggtgaaaacggcggggccaataaagtcacaggctacgcaactaatttaatggccggtcttcaggaaagcttaaaagcatcttccggaatcaatgtaaaagagcttattgagaatttttcaggtaaaggaaacataaaacaaagtataaatgaacttacaaaagaactgagtgattcaaacgaacggcacagccaagaataaaaaaacagcaggcgtaaaccgcctgctgtttcagttcgtccgcttagcttcaagaagccgcggcgcagtcatgaataataagataaggacaatggccgaaaggataaaagaaggaatcatataagtcgcgttatagacggacgaataaatccataccggcgtgcctttcggagcatagcttccgaaaaagacagctccggagaccacatgtgccgcatagcgcagcacactgccgataaaaacaccgcctataacatacatcgttaaagcgcctctttttttattcaatgccgattcccgtacaccggaagcaaacaagccgctgaaaccgaggactgcaaatgccgcgatgtaatcaagaaatagctgcaccgggtgctgcaaaaacaaattgccgatggcgatctggacaatccctgtcaaaaagcctgtcgtaagcccggctttcactccccagcggaatgaaatcaaaaaaatcggaatcatcataatagagaccgaaccgccttggggcatccggagaaacatacctgagacaatgtccagaatgacagccgccccggtcataatcgctatttcaattaagcgcacaagccgtgttgaatgattcatagttttccccctggtcagacaaccgtaacaaggataaacaaaaaagcagcgcggggaaggatgggaaaaggtccgcgcgctgcttgcataaactgcaaatcatttggctttgccacatccctacgccagcgttaactaacaggttcaaagggtcagaacaaaatgttcactctcagctttaatgctccccttgtggtcatcaagtatttagttcaatcttactatacaagaaaatatgccaaaccacaagacagcttatctttctatagaagagaaactgaaataagtatgaaagaaaataattaatgattttttcaaaaaaactattgtcatattttcaaaagggtgttatattattaaacgtcgctgatgaacagcagacaacaacgaaaagcttcggaaacaacttaaaaaaagttgttgacataaaataagctgagtggtaagctaataaagctgcttcaacaagcggtaatgatctttgaaaactaaacaagacaaaacgtacctgttaattcaaagttttaaataaatcgcacagcgatgtgcgtagtcagtcaaacactttatcggagagtttgatcctggctcaggacgaacgctggcggcgtgcctaatacatgcaagtcgagcggacagatgggagcttgctccctgatgttagcggcggacgggtgagtaacacgtgggtaacctgcctgtaagactgggataactccgggaaaccggggctaataccggatggttgtctgaaccgcatggttcagacataaaaggtggcttcggctaccacttacagatggacccgcggcgcattagctagttggtgaggtaacggctcaccaaggcgacgatgcgtag

SEQ ID NO: 9 - DNA, 123154 bp, Bacillus methylotrophicus
agtatcaaaaagctgttaaaacaaaaggcattaccatgagcatgtcccgcaaagggacgcccgctgataatgcctccatcgaatcgtttcattcctcgctaaagtctgaaacgttctatcttaacagcattgatcgaactacgactgccatcgtagaacgcactgtcatagaatacattcattattataacaatattcgtattcaaaccaaactaaacaaccaatcaccgataaactatcggcaattggctgtttaaaaggtgttttgacccctgtctcaaaaacggggggcagtcccagccgcacagtttttttatgcgatggaatgattggagttttcttccgcatccccgttttcacttgcgggcgccgccatacggcgctcgcgttcctgttccatccgttcaatatacacccttccttctttttcaataaacgactggtcaagcttttcctcttctttagctgttgtgaaaagcttataagcgctgaaaataattccgataatgcaaaggtatacccaccaaggaaaaaatagcacgtcggtttcctccctttttcacccagagtctttattctaagctatgcttgataaagacaagttatgagagctgaacgtaaaaaagaccgatcatagagaatcggcctttttatcttattgatggaaagtcggtttgtagaaagaacggttttcaagcgcaaatacacgctctgtgtattcgcccggcttcacccgttccagcgctctgtccatcatgatcatttttgcatccagattatcaatgtagtgcagaatttccgcttctttcaccatcggcggtttcgggcttccccattccgcttttccgtgatggcttaaaatcaaatgcttcagaatcagcacttcttcagcgtcaatctgaagctcttcggctgcttttgaaagctctgtcaccatgatcgaaatgtgcccgagcagattcccttccacggtgtacgttgtggagacggggcctgaaagctcttttactttgccgagatcatgcagaatgactccggcatacagtaaatcccggtcaagagacggatacagatcggcaatcgcttttgccaggttcagcatggacactacatgatacgcgagccctgaaacgaactcatggtggtttttagccgcagccgggtaatccataaactcagccgcatattttttgaccagatgtcttgtgacccgctggatgtttggatttttcatttcaaaaatgtattgagtgacggtttccatcatttcgtttttcggaatcggcgccgtttccagaaaatcatcaatgctgacattttcattctcaccggccggccggatgtttctcagcttaagctggtttcgtccgcgatagtgatggacatctccgatcaccttcacgatcgtctgcgccgcgtacgttacttcatcagtcggcttggcatcccacagcttcgcttcgatatctcccgattggtcctgcagcattaacgtcaggaatggttttccattgcttgcgattcctttagtcgaagatttaatcagaaagtattgatcgacctgctcgccgacctcgtgcagcataataccttttgccattctattaaaagctccctccatatcttacataataccagtatagcacatacctcttttttgaaaataaactcttttatgacaggagccgcatgacttgtccgctgtgaaaagaccggctgacatgctcatggcaggtgaaataaagtatctgccgcccgccttctgaaagctgattcagcacatcaaacagccgctgcagccgctgcctgtcaaaatggacaaaactgtcatcaagtaaaaacggcagtgataccgcagattccctctctgacgcaagggcaaaacgaatcgccgcataaagctgctcgcatgccgcctgtgacagttcgcctgcagaaaacaccgttccgtctttccgcatgaccataatggaatcatcagcctcggaaaaatacaatttgtgatagcgtccgtccgtaagcggcccgtataatgcaccggcggtttctaacagacggggaagcgtcacttttttatgccgctccattttttccctgataatgtgtctgaccgtctgtaatgcggcccactctttagcggtttttttcacgcgctccttctgcatttctgtctgctgttttaaatcggatacaagccccgaggactccaactgctcttgcttcaccgttaataaagcggtttgctcacggagctgggcgcttttttcctcaagcgtttttttctctgtttccttctgaacgactgtatgttcaagttcggacactgtgcggctcatgtacggctccagctgttttccgcctatgccggacaagtgcgttttgatttcgcgcagctgccgctctgtttcccggcggctttcattcagcctggcgagttcacaaaagtgttcgcggttttttgcgcctgccgccatgaaaagctgtttgacctgctgttcgtagtaatgaacttcttcgtttaattcacgcatttgctcttgtgcatgcagcagatccatttcgagcgcctgctttcgttttgcttcctcacgggcccgttccgcctgcgccagcaaaacgtgcagtctttcttttacggacagctcccttccgtctgaaggactcagctttttgacccggtcctcaaatgctctttgcagcttttgcagcctgcccgcttcaatggtcagctcatgcttgttaaggatttcttttttgacatctttcattacatgatatgcgtcaagaagatgggaaggacttcctgaaaaccccagttcattcataaaaagttccgcctgtttttcagacggcgccatttcggcctcccattcttcatattggcggatgactctttcatatgccgcttctttctgttcaagcacggcttgatccgcaatcagctgctgccggtgccggccgtcacgccaaagctcttcctgcagaagatcagccgcttctttagagatcgccggcttctttttcttgtgtccgggccctcctctttctgacggcagcggtttttgcatgccggacagcatatacagcagcagagcaccggtaaaaagggcggcgggcagccattcctttaacatagcgaaaatcgcaatgaacagaatgcccgcaccgagaaagagctttttttgtttggcgcgctgtttttccagatgctgaacatgtgcctgccattcgtttccttctgtatcagccgtttgcttatatgattgtaaagcggcttctttttctttcctgacagcggggtccaaaatgttttccgccgtcacggcatgttttcgttcggcttcttccagctccagccgcgcttgttcgaaaatcgcatcaagctgtgtctttctttctcttgcctgtccggcgctctgcacggcttcctgcagccgccattcatattcataatcggtgttcagtgaaagaatgccgtcctcctcatgtcttccgagctgctgcaatcctgacgaaacgcgggcagatgtctgccggatctgtgattggatggcggcaagctgttcgccgcgcgattcgtacatatgctgctcgccggaaagctcctgcagctgccgctctttttgcagcaagtcctcatttggagcgagcagatcagtctgccgcctgagttcagccgattttgcccgaagcccctcaagacgggccgctttcggatggagatgcgattcgtatttttcaagctgatgcattccgtccttcgggaattgcttcaatgcttccggataagaagaaagttcgctttccaaggctgtttttttgtctgcgagcggctttgcttctatcgccgattttactgttttgatttcttcagttatgtctttcaatcgtgcttcggcatcctgcaaacggccgccgacgctttttttctcttccagaaggctgtgatagcccgcttccgcagcttccgcctgtttcagctgggcgctgagccgctttaatgtatccaactcctgatttaagcgggggttccgcccgttcggcttatacatcctgtcaagttcttttgccagccgcccgtcaagctttgccgccgcttccgacccgaataagctcgaatacaggagaaactcgccgattttgtcccggttaaaagcttgaatctcctgcagtccgaatacatcgaacgaatagatcgcttcgtacagcgcccggtctgtatcggagagaagctgtttgagccattctccgtccttgatttcgcctgaagccgtatacactctgactttttcggcagcgccttttgtccgttcgattttgacagcgccgtgatcgccatgcttcaattccacagtgccgccgtaaaccccgccgtttttcggttcgtatttttttgatttcggaaaaccgaacagcatgcttttgataaaggacatcaatgtcgttttgcccgcttcatttaatccgtagatcacttgcacgggagaatctgacagctgaaaacttcggtcggaaaattttccgtattggtaaatatgcatcgccgttattttcatctctgaagctccttcatctggcgtcttaaaacggcttgagcctgccgcttaatatccagtatctcttcatctgtaaatgaagccatctgacgccggtatacgggatgacgctcaagagcttcaaatacaccgctcatgtctgcgcattgttctatgtcctgaaggagccctttaaaaaacggatcgtgcggcacggtgtctgtttcatccgtccgatcctcaagcgcaagcggccagacgaaacattcctcttcggcctcttcctcctgtaaagcggaaagaagctcctccgcgatgcctgcgggcgcctccgtccaaaagcggggcgctgcgccgcgaagcaccagcctgacacatgccgggcggcccgccgcgcgcaagccggagaatgtatctgatgcggctttcagaagtgaagtcatatgttcagctccggagatatcaagatcaatttcctcccataacacatcatgcgcttctttgaattcccaagacatctcaccgtttgccgcccggacgagataatatcccttaggtccggtttcttttaaatgccgggcttgaatattcccggggtaaatggcggcgggatgctgggcggacaggacctgccgtttatgaatgtgtccgagcgcccagtaatccatgccgcttttttcaaggtcttctttcgtaaacgggcagtacgggtcatgcccttccgctcctgataacatgccgtggagcatgccgatatgataaggcgcgccggtcattttccggtaacgggccgcctgattgaccgttacgcttctttcctgatagctgcatccgtatatgcttgccgcaagctctccgtttttaaagaaagatttttcctccggtgtatccgaggtgaatgtatgtacattttcaggccattcaatcggcgtccacttaccgcccaaatgatcatggttgccgaatatgacgaacacttggatatccgcttcctgtaatctcgtaaactgttttctcaaaaacagctgggcttttaaacttctgttggcttcgtcaaacagatcccccgaaagcagcacgaaatctgcctgctcccggagtgccccgtccgtcagtcggcggacgctgtgaaatgtgctttctttaatacgcgcatataccggttcaggcagattcgaaatgccgtaaaacgggctgtccagatgcaggtcagcggcatgaataaacgtcagatcagccatctcgccctcccctttctgcaaattgaattacccttattttagcaccgtttttatacgaatgcacgttctgtaaaataaaaaaacagcccggctgttccgggctgtttcacttattttttggagatgcgcagcgcttgtttgatcgctttgaatccgctggcgtttccgtaaatcaaaacgccgcctttgtaaattttcgcgccgaccgctgcaaagatcacgatagtgaccagtgtcagggtgattccggccgcagcctgccaaaacgggatatcgagcatcccgacgcgtaaaaacataatcatcggcgtgaaaaacggaatgtaagatgtaacggtaataaaaccggcgtcaggattgccgatgccgaacatggcgatcataaaacctgccacgactaaaaaaaccatcggctgaatcgtctgctgtacgtcctctatccggctgacaacactgccgagaaacgcggcaagcgtcgcgtaaagaaaatagccgagcaaatagaaaatgacagcatagactatcgtcgagacgggaacatccgtaaaattgagaaatgcactgatcggcgacgacgcatcattttgagggttcagcttcagtgagagataaccagccgcaatcagcaccgcaaactgtgtgatccccacgagcgcgataccgaacagtttggcaaacatctgctgaatcggcggcatgcttgaaattaaaatttccatgacgcgggacgatttttccgtcgccacttccatcgcaatcatgcttgcgtacatgataactgagaagtagatgacaaacagcatgatgtatacaagccccattacctgaccgagctcttcctcggatttcgcccctttttccagcgcgtctttgctgacttccggcggagtgtagaggctgctgactttttctgccgaaatgccgagcttggcggtttcaacagcggtttttgtctgggttaaagcctgcttgagcagtttatacgctgattcatcggaaatggtcagcgccttgtatgctcctgttatcgttcctttttgatcttgtctgatgataaacagtccgtcccattcaccgtctttgacacgctttacggcatctttttcggactccttcgtctccattgcctgcagatcattgtctgtatccgccgctttaagctgttttgcaaacgccgggtacagcccgcccgtttcatcaatcaccgcgatttgctgcttgccgtcatccgattgaaacacggatataatcgattgcaggttggtcaccgctaatactaataaaacggtaatggcggtcgaaataatgaatgactttgtcgcgattttgtttttatatgtatgaaacagcataatccaaaatttattcatatacggcccccaccttttctataaaaatatcatgcagtgacggctcttccaattcgaacttccgtataaaacctttcccttgcagcgcccggaaaatatcctgagaaaccggttcattcgcgacctgcagtctgattccgtcatttgtttccttccatttcacgacgccttcatgcgtttttaaaaagctgaggtcatcatctgaatgaacggtgacattttttttgccgaaagaccgcttaatgtctttcagattgccttgaacgacgggttttcccttctggagaatgcacaaattctcacaaagctcttccacatgctccattcggtggcttgaaaaaacgatggaaacgccgctgtttttcaaagaaatgaccgcttctttcagcagctcgacattcaccggatcaagaccgctgaaaggttcatcgagaatcagcagttcaggcttatgcaggacggccgaaatgaactggattttctgctggtttccttttgacagctcttctactttcttattcttgtaatctgtaatgccgaaccgctcgagccatgtcatgagctctttttccgcctcttttttgctcattccttttaatctcgccagatagacaagctggtcactcaccttcactttcggatacagcccccgctcttccgggagatagccgattttttcactgatggaataattgaccggcttccctttccaggtgatatgcccgtcagtcaggcttaaaagacctaaaatcatccgaaaggtcgtcgtttttcccgcgccgtttgcgccgagcagcccgaacatttccctttcaggtatttgcaggttcaaattgtcaacagcggtaaagctgccgaatgttttcgttacgttttcaattgtaagcacgaatccaactccttccttgacccattatatactaataatgggtaaaaattaatggaggattttaaattctttatcagaatatcattctataaagggggtgacatgatgggacaatatgtattgaccgcattccatgcgtcgggagaaacgctgctggatgaacggatcgaagcggataatgaggcggaggcgaaggccgccggagaggctttgttaaaggaaaaaaagcttgagaacagtactcaccgcttggtaaatgaagccggaaagctgattttattccacagataacagaagctttccggcttctgtatgttaccggttaaattgcggcgtccgtttttctaaaaaggcgcggatgccctctttatgatcatccgtttttctcatattttcctgggcctttcgttcaagagacaaaacgtcttttaaccggctgatatggaggctctgataaatagccttcgtttcaatcatcgctgacagcggcgcatgcagcaatcggtcgatatacggttgcgccccctccgcagggccgccgctgaacagcccgtcggcaagcttgagccgcaccgctttttcagccggcaatttttcaccgctccaaatcagttttttcgcttcgatctcaccgacgcgtctcattaataaataatggcctcctccatcgggaaccaatccgatgccgatgaaattcatcgcgaggcgggcgttttcttcagcgagcaccacatcggcgcacagcgcgaaactcagcccgagccccgccgcggctccgtggatggcggctatcacaatttttttcatatcatagagcgtcagcgtaatggattcgatcattttcatgagccgttcatattctcctgaatcatgatcagacgtcatcatctggatatcaccgcccgcagaaaatccccggccttccccccgcaagaggacgataagcgcttcgctgtcggcggccatcacgcatgcattttccaattcccggagcatttgttcattcagcgcgttgtaactgtcaggccggttcagcacaatctctgcgatctttcccttttcttcataacgaatatactgcatgtttacaccctccttgtatccgcttacatattttgttcaaatgatatattccttccgccgaagcgaaactcctttatttttcaaggtcaatagataccgaaaaatgcatatcatttgaaactgaacatacatttttatatagtgaaattgatatacaaaacaaaagggggaaaaacgccgataatgaaatatgtgatactcagcttgttactgagcttttttatggtgctgttccccccttcggatgtcgctcttccttcccaattggtgacagaaacagacagccatgtacaaatttcggtttacccgcaggaaacggaatcggcaaagacgccggttcaaaccaaaaccgctccgcaaggcctgtcaaaaggatacggtgcgttatcccggatgatctccctgttatctgtcaaacctcttgatcaattcattgattccacaatggaaaggacatgcgccattccgatacaataccagtcaaattacctccggcatcagaccatttctcattgccaatctgtatttacgatgtaaaaacagtatattccggagggattttttatgaatattaaagaaaacgatctgcccggtatcgggaaaaaattcgaaatcgaaacgagaaatcatgaaaaaatgacgatcatcattcatgatgacggcaggcgggaaatttacagatttgatgaccgcgaccctgatgagcttctggcaagcatttcacttgatgatgcggaagcaagacagattgccgcgattatcggcggtatggtgtataaaccgcaggcgcttgaatcgattgaaatggcgttcaacgatctgattatcgaatggtttaaagttgaaaaaggggcaaaagcggcagggcggacgctcggcgaactggatgtgcggcagaactatgacgtgacggtcatcgccatcattaagcataaccggaaaaagcttttaaacccgggcgctgattcgctccttgaagcaaacgatacactcgtcctctcaggtgaaagaaagcatctgaaaaagctgatccaagacttcctctccagagacggagtgtgatctgtttatggaccatctcgtatttgaagtcggtacggcgttagttcttgtagccattgcgagtgtcatcgccaataaaattaaattctcgatcatccccttcctgatcattttaggaatgcttgtcgggccgcacgcgccccaagcgggcatcattgacctgacgtttatcgaaagccgggaagtgattgaattttttggacggatgggcgtcctgttcctcctcttttacctcgggcttgaattctcggtcggaaaattagtcaaatccggacgttcaatcgccgccggcggaacgatttatattctgattaatttcagtttagggctgatctacggctttatcacgggcttttcctttttggaagtgcttgtattggcgggcgtcatcacgatatcatcaagcgccattgtcgcaaaggtgcttgtcgacttaaagcgcacggccaatccggaaacggagctgattctcggcatcattatgtttgaggatatctttctggcggtttacttatcggtcgtttccgggcttgttctgggagacgcgacgtctgtcggaggcgcgctgatgtcaatcgtgatcgctttcggatatatgctgctgtttttcattgccgcccgaaaattgccgcctctgctgaacaagctgcttgatatccgttcaaacgaggtatttgtcatcgtcattttcgccgcgctctttttcattgccggcttttccgaaacgattcatgtcgctgaagcgatcggcgcgctattgctcggactcgtgttttcggagacggcccattctgacaggattgagcatcttgtcgtgccgttccgtgactttttcggggccatgtttttcttcagcttcggtctcagcattgatccgttttcactcggagatgcggtatggcttgcccttggcgccgttctgctgacgattgccggaaactttatcgccggcatgatcgccgggcgccgggcggggctttctcataaagcatcgtctaatatcgggctgaccattgtgtcacgcggcgaattctccattatcgtcgcaaatctcggcatcgccggcggcctgtccgcttcacttaaacctttcgccgccttatatgttttgatactggccatcttcggccctttgctcacgaaagaatcgaagcggatatatctcctgttgaacagcgtgttcaaatggaagacgcctgaaaagaagccgcagaaatcataaaaaaactgacctcttcataaggggtcagtttttttgagcgggaagaaattgctgaaaagccgtttttttattaatggagaaatgctcttttcccagaatggtattgatgattttttgatttctgtaaacagacagcttcaaattcgtagcgcccgttccgtgagcatgatcaagattcgttaatgtgaaaaaatgatgccgcctgtcgtccttaaagacaagacgggaatcggccgtcactttaaaccgtttctcatcctcccattcgatatcgggggcaattgccgtaaaccattccggaatatgaggtttaaaaccggtcgccaatatcactttttctgaatcggccgtaaaggtttcatccatctgccattgatgaaagctcagtacgcagcgcccgttttgcttttcaattttttcaagctccgccatcggctgaatatacacgtcaggcgaacctccgctgatcgatctgtgatacagggcatcgtaaatggcggcaagtgtgtcagtatcaatgccgtggcgcagtccgtccagctcaggaagtgtgttcagccgttctttaaaaggcaggcggttaaaatattccacataatcaggtgtaaacatttcctgcccgagcttggcggtttctaattctcggaatccggcggagcgtgtcacccattgcagccggctgcggcggtatttttcatcgtgcaataagtcagaaaagatctccgcggcgctctgtccggagccgaccactgtaattgattcggcgccggcgagctcgtctttccgaaacaaatattccgtgctgaccatcgtgtcctgacgcgcttcggcagcaatctctgcgggaataagcggttcagaccccgtccccatgacgaaatgcttcgtttgatagacactgatgcttccgtcctcaatgttcttgacgctgacgtcataatgtccgccggcatttttcacgccgattacctctgagccgaaacggcatgatttgatttctgaagccgtccagctcaaatagtcgttaaattcccgtctcggaatatcaaattcattaaacgtataaaaccggtacagccggtcatgttcatggagaaagtttaaaaacgtgtagcggcttttcggatcggcgagcgtgaccaggtccgccagaaacgccacctgtaaatccgttcctttaattaacaggcccggatgccacgcaaattctttctttttatcgaaaaaaagagcgtttgttccgggtatatcctctaacaatgcggcaagccctaaattaaacggcccgattcccgctcctatgacatcatacatattatgcacctcttgcgaataacagtctgatagtcttttcccgtttttaaagaccgttaaacataaaaaaaacggcacgctgattccgtgccgtttttgatattataatgcagatttgacgaacatctcatctaagtatttgattttctcttctgtataatgctcgaatcggtcattatatgatttcggatctttcggattggcgaagtgcgtgatttttccggtttccggatgaatgaatttgcttgccgcgccgcagccgataccgataatcgtctgcacttcttccataatcataatgttgtagatgctttcctgaccagggaaggagtatccgacattttcaaggtttccgagaatgtttttctgccggtacaagtagtacggcgtatagccgtgctcttttgtccagcggacggcgtcatccatcatgcgggacacttcctgtctgtcggcaactttatacttatgcttgtttctcgtcatttctgacgcccgtttaaaagaaagcgtatgaacggtcaaagattcaggcatcagcttttccgtttcctcaagactgtgcctgaactcagccgtcccttctcccggcaggccgatgatcaggtccatgttgatgttgttcatgccgtgtttgcgggaaagatggtatttttcgatggtttcttcaactgtatgatgtctgccgatggccttaagcgtttcgttttcataagattgcgggttgatgctgattctgtcaatcttatacttatttaaaacggccagcttttcctccgtaatcgtgtcgggacggcccgcttcaacggtaatctccctgatattcgcgacatccgggaaagagcggaccatttcttcatataaaagatccatttcttcagcggtaatgcttgtcggcgtgccgccgccgaaataaatggtcgtcactttgatatcatgccgcttcagccattctccgattttctgcatttcatagtgaagcccccataaaaaggagccgactcttcccgcctgtccttgaatggcataagccggaaacgtgcagtaggcgcatttcgtcgggcagaacgggatgccgatatatatgctgacttcatctttgacccggtacagatcgggaaccgcagcgagctgacggtcgacaatctcctgcatcagattgattttttcatcatggatcagataatcttttttcagatcggcgtgcgcctcttcttttgtcaggccgctctgcagctttttatgaagaagtttagtaggcctgatgccggttaagattccccatttttgtgtcatgcccgtatgcgattgaagaagatttaagtagacgtacgacagcgtgtttttcacctgtttaaatacttctttttcgctccatccggcaagaagcggtttcgtgtgatgttccttttcgccggttcctttgatttctccggataccgacacgctgtctgcatcttgagaaatggcaagtgagatgacgagatcagagggttcctccgtttcgccgtacgcaagaacacactcttcaaaaaataaattcgcgatgttttgcagcggacgatgcagcctgtcatccgtgatgccgtctatttttatttgcaatgtgatcaccttatttttcagattcaaaactttctttagtgtacagaaagaacaggctaaaatcaatccgcgaaaaagccgcagaccggcggttcgcgtctgcggctcttgattacggccgtttcatatggaacttatcgagaaagcctttgcggtgctgcatgcggaaatattccttaatcatataggcgactccctgttcatcatttgaccttgtcacccagtccgcttttctttttaattcatttgaggcattccccatcgcgacgccgagaccggccagctcgatcatcggcagatcatcttcctgatggccgatagccacaacctcttccattgaaagcccgagttcagcggcgaccatcgaaagtccgctttcttttgaaacccctttaggcacgatgttcagtttttctccgttgacgcggatcgcatcgacggccgggaatgctttcattatcgtatccgttatatcagcctgcaggccatcttcggcatgcacttcaatgacgggcgctgaaaccggctcatcaaggagcaggtcacttaatgattcgacaaactgcaccggataaaaaatcgggtcagacggatgaatcatcgttttcccgaccagattggagttcactttcttcttgtttccgatcgaatatttttcgtgaagaagccggatattgcatggatagctttccagcacctgaacaatattaaacgtgtgatcttctgatattttcttttcaaaaaacggctcatctattttttcagaaatgtatgcgccgctgtgggtaatcaatttcgcattcagctttaatattttcgccactttttgagcggagcgaaaatggcggtttgtgaccagtgtgacgtaaattccttttttcttgacgtattcgatggcatcctttgtcgtctgatgaagtttgccgttggagcgaagaagcgctccgtctatatttaacgccagcatttgttttgacacagagaagtccccctccttgatgactgtacttgtcattaggatatgaccctgtctctttgtttagaacaaccttttctccgcagcaaaaaagcctgcctcaagcagactttgaactgtcgttttgttgggatacgatcgatttgctgccttctccccaatgtgtatttctatttacgaaatatatcaggaaccccttatttgaccgttgatgcgctcgtttcacttactctctgttgctaccccttatcataccaggcagtataggcgaccgtatccttagatcatctgtaagtgtaggcgctttcagagttattatctcaattatattgttaaaaaacaagggtttttttaactaaaaaaatcagaggaaatatctatgctgaatgtatgataaagttgaaagagaacatacattcccatataataaaagaaaaaaagcggtgactgtcatgtctctattaaaagatatttataacgaagaatttgcagaagcacttctgaacagaatcaaatcggcgtatccggcttttgagcgggacaagtgccgggcgctgatgtttcaggaagattggcccggactgacgttaaaacagcgaatgcgccggatcacagactctttatatgaaacactgccgaaggattacatacgggcgcttgacgtcttatatgagacagctccccacttctcagggctcgccgggattatttttcccgattatgtccaacagtacggaacggatcactgggacgaatcaatgaaggcgcttcagtatttcactcgtttttccacttccgaatttgcggtccgcccgtatatcaggcttgaccgggtgcggatgttcaaagagttcctttcctggacggagcatccggacgaacatgtcagaaggcttgccagcgaaggctcaagaccgcgcctgccatggggaatctccattccggctcttcttgaagatccttctccgattctccctgttctggaccgcttgatgcaggatgactcgttatatgtcagaaaaagcgtggcgaataacctgaatgacatctccaaaacacatccggatcttctggcacagatcgcagccgagcggttcggaagctgtccgcacacggactggattttgaagcacgcctgcaggacactgttaaaaagaggagacaaacaggcgcttgcggttttcgggtttgaagacgcctcccggatttcattggaacgttttacactgaatccggaaacggccgccatcggaacaagcatacatttttcttttcagatccgctcatccgcccggcaaaaagtcagggttgaatacgcaattgattttgtaaagaaaagggggcaccgcagccgcaaggtgtttaagatgtcggagtccgccatggataacggagacgtaaaagccttcagcaaacatcattcccttaaagatttaaccacccgcaagcattatcggggaattcacactctgtctgtcatcattaacggaacggtaaaaggttcgcttgatttttctgttgaataaaaaaagcccctccatttcatagatggaggggtgtggagcttattgcgggctgccgtaaagctcttcaagaggtttcataatgattttgtttaactcgccgatcagcatgctcatgcgctgttccgcttccatcagctgagaaatcaattcatgctgctgtacgagagccaccgttttttgtgcctgctctacctcttcctgagtgatttcttcacctgacatctgtttctgctgcagctgcagctgtacattgcggaagttatcaaacatgcgttttgcggattcatctgcgtttacttgatcataaagccctctcagacggctgtattcatcactgtttcgcaaagctttttcaagatcatatgctgcatcataaaaatgaactgccatagtaaccgctcctttcttcctttcggacataccactccactataacagactgcggagcgactttcatcatcggcgtatgttttccttagaaaagaatgacaaacaaagcctgaattgctccgattatcccgccgagcagaccgcctaaatacgttatcatcttaaattctctcttggaaatcgacagcaccatttcctccagccgttcaacgggaaactgatcaacctgctctttgaccacttcctcaagacgcagccgtttcagcacatcctccaaatgagcggcaatactgccgagtgccgcatcaagcagcttcggcgcgtacgttcccgtaatctccccttcataacgggagatgatgtcaccgagccggcattcgaaaaagggcgcggtttgaagtgcggccaaaacccgctttttcatgctgaacagcagatctttcgcattccacttttcatcggcctcataaagtgtataagatttgagcttgccccattcttgagaaagcagatcagccagaagctttttcgtttcctcattgcgcaaaaactttaacagctcaggcagcacacggtctgccaagcttgaattgccgaggaacatctgcaccatgctgccgagcatcccccgggaattcaaaaagtcgtcaatcatatttccgagcctgtctttcccttcttcgctctcaaaataatcaatgctccgcttcagaatataatctgcggccaacgggactttttcatccagcttttcctgaagctcatcaggaagccagtcttttatggcgcggtgctcatatttccggtacagttccgaaagcttttcatcggtaaaacggtcaatccaggcatccgtcttttcctgcggattccggatgcccgcggcggccaaagcttcgtgcaccgtcatctcggaagcggccattttttgtgtgaattgttcggcgaaaagaagcgcctggtttttaacggtatctgataaaagccgcttttttattccttccggggttaaaaggtggttcgtcaccatgagccccatttgttttgccaattcatcccgccttttcgggatcagccccggcgtaaacggaacccgttttccgaacaggtaatacggccggtacggacgaaataacatctgaatggcaagatgattcgtcaccgcgccgatcgcggctccgatcacaatcataaatagaaacgttcctgctatgcccattccttttcttctgcctccatcttatgttctattttcttgatgatatatctattcgtattatagaggctggcgtgcatgcgggcaaatgaagaacctgaattgttgtttgtgaggaataaggcaagatgctgtttcgtactctttacagtagatcatcttttatgatgcgcttagcatatttattggatggaagggccgttccatcagcggctttttgaataaagggggagtaataatatgacaacactcggttttatgtctgtatcccgccggcacgaagaagattacgccggggaattggctgaaagagcgcctcaatataatgtgcgcttagcccgctttacaccgtttgatatatttccggattctttgcgcgtgaaagcgctcgtctatcacccgcaaagcggaaagtggaacgaaacggaaatcgatattcccgaatatatttacgaccgctgtttttacggaaaatccgctgaagcgcaaaaagccaaaccgatcgtcgaatggctgaaaaaatatcggaaaacggaatttatcggccgggggcttcctgataaatggacggtcacggatgcgctccaaaagcatcatctgatcagtccctatattcctgaaacggccgaagtcagccgctatgaacaggtgcaatcatacttagccaaggaaaaagcatgtatacttaagcccgctttcggcgcgggaggcagaggcatcatcctgcttgaaacaggcaaaaaatcaattacggccacttactatatcggaaaaaacaaacaaacaaaatcattttccaatcacgtgtcttttaagtcttggtgcaaaaaagtgctgcagcaccgctatttgcttcaatcctacttaaatatccaggataaagagcggcatccgtgcgacatccgcattttcatgcgcaaaacggagtcaggcgtttgggaaacggtcggaaaagcggtcagaaggggttatcagaacggtcttttatctcatttgccaggaggatctgaaccgattaagtttgacacatggtttgaggaaattccgagaaagcagcaggccgttttattggatgatgtcttttcgatcacccaatccgtcccttatttccttgatgaacggttcgggccgctgtttgagctggggctcgatatttgttatgccaaagacggacgcatctggcttttggatgtcaactcaaagccgggacggaaagctattttaagcgtggctccggaggcgaaagaggatttgtatacgagtccgctgagacgcttccgcgaacttcagtcacaggaaagccggaaaggagtattaccgcgtgaatcataaagggatgattgtcggcatcgataaaaaaagcaaaaatacgctgtttctcccctcctccatgaaacgggaagggcttttatcggctgccttcgggaccaaggttgtcaaatgccgtgtagccttttctcaatcacttgaaaaaagcgcgctcctttctgaagatttgtttgaggagctgttgataccgcataaaagccgggctgactttctcatacacggccagacggtgcacatcggaccgctgatcggcgttttcacagccgggttcacatcatcgccgtcccgcccgttaagagaccgtacagccttcttttccaagatgctctctcttcatgaacaggcgaacggatattgtttcgttttcggggcccatcagatcaactgggaagaaggcaccgtccaagcgctgatttataaagaaaacagctggaaacggacggccgtcccgcttccgaatgtcgtatatgacaggctcccgagccgaaaaacggaagaagttccgcttttacagcagacaaaacaaaggctgatgaatgactatcagattccgtggtttaatccgcaattctttaataaatgggacattcataagcttctggaaaaaaacagtctcaccgcttcacttctgccaaaatctgtcctgcacccgaatgcagaagcgttagaaacgttatgcagcacgtttgacaccgtctatatcaaacctgcagacggcgcactcggaacggggatttacaaggtggaaaaaacagatgccggcttatctgtcaaacacacgaatgaggaaaaaacggtggtgacggcagagtattcagatgcggcatccttcatgacatcatttaaagaaaacaatgacccgtccgcatttttaattcagcaaggcattgacctgatccggctggatgggcgccccgtcgatttcagggtgcacacgaataaaaacgccgaggggaaatggacagtgacggccattgcggcaaaaatttccggtgaaaacagcatcacgacgcatctggcaaccggcggagaagtcaggacgttagctgaattatacggcgatccgcgagagagagtcggcatgatgcggaaactttcaaaagccgccttggcggtcagccgcgtgttaaatgagcacattgaaggttttatcggcgaaatcggttttgacctcggcgtcgatcattcagggaaagtttggatgtttgaagccaattcccgccccgggcgcagcattttttcccatccgaagctgagatcggtcgattacctgacaaaacggagaaattttgaatacgcgtcgtatttatcagaacggtccatcaccgctccggaaaaactttggcggtgaggccgtctttttttaggtttacccgggacaggcattgaacgatgagctacaatgaacaagatcaacatttcccataaggagcgtgaacgtcatgatttcgcacttcagctggaaaccgttattcaaaaaagagaaactgcccggatggcggatttcattttactggcagggtacgcattacgaagggatttaccataagtccggagacattgaatggggacacacacatccgggaaaagaagagccggctctcgtaaaagagctgcatgaattaatgctttatcacatatatgactaaaagctaaaagctcagccgcaccaggctgggcttttctttttccttccgctatttaccacaccgttttccgaatgagatgccgtttgattcaccataatacgtagtacaaagcggcaaacagcattgggtgaagccgagctggcaatggttttcgttccgaaaatcattggctggtgcaattccagcaaacccaaccatactactttataaaggagatcatacaaatggcaaacaacaactcttcaaacaacctagtagtacccggcgctgctcaagcaatcgaccaaatgaaatacgaaatcgcttctgagttcggcgtaaaccttggcggagaaacaacttctcgtgcaaacggttctgtcggaggagaaatcacgaaacgtttagtatctttcgcacagcagaacatgggcggccaaggcgtacaataactcaataaatggcttacagaaggcgcgggataccgcgtcttcttttatgccgtcacccttttttcctattccacataccctaggaaaaaaggagggaaaacatgtcattcattgcctcagtcaattgggagctgtttcagttcgtaagtgtttctttggtcaatgaatatgttgcccaccatttcccgtttattcacaggtattcttttccccgctgctttgaatgatataatgagcggcgaggaggttttttacatgaacatcgctttactcggagcaacgggaagagtcggacaggcttttataaaagaagcgcagaaacatggacacatggagatattcgctcttgtcagatcagccggaacagtccttcccattcctgaaaaacaaatcataacagggaatgcgaggcggcgggaagatgtaagccgattgatttccaaagcggacacagtcgtgagctgtctcggcacggacggtgacgataccctttcagccgctatgacccatataatagacagcatgaaacggcatcatgttcagcgtctgattacgatcggcacggcgggtatccttcaatcacggcttatgcctgatcaataccgttttgaatcggcagaatcaaaacgaaaatcaacaagagccgcaaaggaacacgcccgcgtatacgaaatgctgctggcagaggatcttgactggacgatcatctgtcccacctaccttcctgacggagatgctgccggagtttaccggttcgaacaggatcgccttcctgaagacggcgctgaaatcaccgtcggagacacggcgcactttctgtaccgtgagctgatcagcccgcagtttgtcagaaaacgggtgggactggcttactgaatgaaaaaaagggcgaatctttagattcaccctttccgattacaccgcggacttcgccgttcctttctgcaattcatacatttggtggtactgccccttttgcgccattaattcgtcatggcttcccttttcaataatgcggcccttttccagcacgagaatctggtctgcgtgtctgatcgtggaaagccgatgggcgataataaatgtcgtgcgtccttcttgaacgacttgcagcgctttttgaatgactgcttctgtttcggtgtcaatgtgcgccgtcgcctcatccaaaattaaaatggccggatcgaacacaagcgctcttgcaaaagaaatcagctgacgctggcctgaggacagtgtgccgcctttttcggtaacgggctctctgatgcccttcggcagggattgcagaagacttgcggcgccgacttggcgtagcgcttcttccgcctgctccaaagaaatacgctgatcatcgagtgtcacattggagccgatcgtgcccgagaaaagatacgggtcttgcagcacaatgcccatatgcgacctcagctcctgccttgacatgccgtatatgcttttatcgtccagcaggatatctcctttttgggcctcataaaaacggaacagaagattcaggatggagcttttgccggaccccgtatggccgacgagggcgaccgtctcccctttttcagctgtaaagctgatgtgtttcagcacctcttccccctttcgatatccaaaagaaacatcgcggaattccactgtcccttccgcctttctgtctgcgggagcgccttcttcttccgtttcctcctcctgtaaaagctcgaataccctggcggcagagacacgggccaattcaagcttcgaaaattggttgacaatccccgtaaccggctggaacaaacggtttaaataatcaacaaatgcatataaaacaccgatcgaaacaattccggccgcactcagactcgcgcctccgaaataccagatcagcccgacaaacgccagattgcgcaacacattgacaagactgtgggacatgagggaatttaaggacagcattttgttcttatagcgaaaatgagcttcattcaattcttcaaattccttcatcgtttccttttcgcggcggaacgcctgaataatcggcattccttgaatggactcgttcattttcgcattgatgttactgttaatggaacggattttttggttgaagacggatgcgtatttgcggtacacaaccgaccagatcattaaaatcggaataatcagcaggcaaacggcggccagcctgacgtcaagcataaacagcgccgtaaaaatgccgagcatataaacgccgcttgtgataaatgtcgacagcaccgttacatataaatccctgaccgcttctgtgtcattcgtaatgcgggccacgacttttccggcaggcagattatcaaagtagcggatcggcattttctgaatgtgtgaaaatacatcctgcctcatgcgctgtatgatccggttcgctcccatctgcagcagataatgctggccgtaatgaaaacatacggaaaacatgagcagtcccgcgtaaatggcggtcagcgtcagcaatccttttatttcgggacggtaaaattgaaaaatctcctgtcttgataacgtaatggcgggatatgacctgctttctttaccgtttgatattgtcagccggccgtcagacaccgaacggtttccgtcaaaactgacgggacggtcaacaaaatagtagcccgcaccgacttgataaatgtgcgcctctccggttttgtccgcccccggtttgagccggtcctccctgacataatcatgcccccggaacctgacggcgcccggatcgtccgcagagactttaacccatgttttttcaatgccgagaatatggtcgtcaatcattttttttccgataaacgggccggtcagctcagtgccgaccgcaataatgagcaggacgaccgcccatatcagcagcttcttatattgaagcgcgtaattccataatcttctcccggtcttcatgcgcccgtccccccttcttcaagagaggacagctgctgcctctcatattgttttcgataccagccgttctgcgccaatagctcccgatgcgtgcctctttcagacacccggccttcatccatgacgagaatgagatctgcgtgttcaactgccgagagccggtgggtggtgataatcgttgttttatgccgccgtttttcacggatgctgtcaatgatggcggcttccgttttcgcgtctacggcagaaagcgaatcatctaatatgagaatgtcaggatcggtcaaaagcgctctcgcaattgagatgcgctgcttttgtccgccagagagcgctacgcccttctcgccgacaagcgtctcaagcccgtcggaaagcatgccgatatcgttttcaaaatgcgcatctttcagcgcgctgccgatttcctcttcgtttgcatcctgccggccgtaaagcagattctcttttacagtctttgaaaataaaaaatgatcctgcggcacatagccgatccacccgcggagctcctcaagcggaatctcctgaatcggaacgcctgtaaacgtgattgctcccgcaccgggcggatattcacgcaacagctgcttaatgatcgtcgtctttccgcttcccgtcttcccgacgatgccgagcgtctgccctttttctacggaaaaagatacatcagaaaccgccggtcccgctccgctcggatacgtgaaagtcacttgttcaaaaacaagacgcccgggctccttgatgccggcggggtgcttgggtcctgtcacgtctggctcataggaaagcgtctcattgacacgatccaaggaggcatttccgcgctgcatgatattgattaattctccgatcgcaaacatcggccagatcatcattccgaggtacacgttaaacgataccagctctcccagcgtcagccggttttgaaaaacgagataagcgccgtagccgagaccgatgagatagctgaggccgacgagaagttttacagtcggttcaaaaagtgaatcgataaacgccaccttcatgtttttctcatatacatccgccgtcatatcaccgaaccggctgacatcatttttttcctgcacgaaagcccggatgacccggacgccggataccgactccagcaccttgtcatttaatgatccgaaagcatcctgcgcttccgtaaaccgctcatggatcttttttccgtacaggctgaccgcagccgccattatcggcagcggaataatcgcggcaaatgtcagcttccagctgatgagaagccccattgtcaaaaatatcgtcagcatatacatcgtcgaatcaacgagcgttaagaccccgaagcccgtcgtcatactgacggcctgcaagtcatttgtcccccgcgccattaaatcgcccgttctgtatttctcgtaaaacggcggtgacatttgaagaagccttcccatcagctttgaacggagaatcttctccatgacattcgccccgccgaaaagctgatacatccaaaaataagacagtaaatagacggctgccgttaatgcgagaaaaacacatatgtaaaacagcatcccgctttttgtaaacacgcccgccttcatatcgtctatcgcgttaccgagaagtttaggcggaaacatttcaatgacattcacaatcaataacagaacaatcgctgtcgtatagcgcagccaataggctttaaaaaaccacgcgagcttttttaatacagtaaacaaataccgtcatcccctttcatcaatcagccgccctcaagcttttccggattgtttttcattgttttcgctaataccgccacatgcatcacacctgtctttttttcatttttttgtataaaaaaagacatgaagcctcagctccatgcctcttattattataaataaggtacagacccgccgtttatgcgcgactgccccgtttttaagcaaatgttcagaaaacggaagctgtatgggagtcacgccggtattcagctgaagatgagttgacaagctttagttttgacatgatccatacctcctttttccctatattgttccttcatcatataaacaaatcctttttttgtcaatgcaggttttgcatttctgccattcgggtattgtaaaacaaaccttttttactgaaaggatgaggccgatgtttcacgcggaccggttgatagcagcttttgacggaagtgatgatagtaaaaaagcgctccaaaaagccatagacctttcaaaaacatttcacgcggatttaacggtcgtacattcccacaatgcaaaagatacccagacgattgttgatcccccgaggccgggagccggggcaacgtatatcggcggcgggattgcaagcgttcctgacccgctccaggcggaaagaatctcccctgatccgatgatttatgaagaccgtacggaagaaatcgttgcggaagcgagaatgctgatgaacgaaagccagattgacggggatatcgacattttagaaggtgatcccgctgatgccattatcgagcatgccgaccgtatatcggcggatttgatcgtcatggggagccgggaccagaacaggctgaaaaaacttttattcggaagcgtcagtgaaaaactgtcatcgaaatccgatattcccgtgctgatcgtaaaataattctttctgtaaagcagcttaatcaaaagctgctttttttacagctcccggctgtttcttctttttttcggcatcacaaaaaaactcgccatgatcaaaaaatcgatgcataatacgacagaccagccctttaacagcttgctgagagcttcggtgcgggaagcgtcctgaatgagaaataccgttccggctaaaagaacgccgccgatgacaaacgctaatacatgtctcccccatccttttgcataatgtttggcataatccagcccgtaccgtttgaccggttttgccccttccttgaccacataatagcggaaccgctcatccgcccattgaatcatgcttttcccgaaggcgacagacactccgatataaatggccgccaccgcatgcgccatagtcgccgccgcccctctgtataaatcagctgcggccgccagaaacagtacggcatccaataaaggaatgagagcgaaaaaaaacattccgagcttttgccgcctgaatatataacgcgccgccaatccgaagatgacagccgcccaaaaagcagcctcacaaatgacaatcaaccaagcaatcgcgttcaatccggttcccccttatcgttttctaaaatgcattgtatcactgctttttatttaatacaactgtattacaaaattgcaagaaaaaatatttcctgttacactggaaccatgcctaaaataatcgatcatgaaaaaagaagaaaacaaatagccgaagccacttggcggacgattttggagcggggaatggaaggagcgacagtgagaaacatcgcccaggaagcgggtctttctttaggcgcgctgaggcactatttcaccacccaggatgagcttttagggtatgcgatgacactcgtaaaagaaaaagcggccgccagaattaacgaagttgccatgaaagatctgccgccgaaagaaaaagcggtgcgtctgatgcttgaaatcatcccgacagatgaagaaacgatggctgaaatggaggtatggttcgctttcacagcttatgccagacataagggagaagagtttcaaccccagcaggacgggatcttagcatatatccgcggtctgattgactggctggatgaaaataagcttctgaaaccgaatcttgataaagagatcgaagcggagaaaatgtacgccatcgccgacggattggcgctgcatgccatgcttgaacctgagcgtctttcaaaagagaagatctcccgtgtgctcattcagcatatcgaatctctttttatctgactgaagtaaaaaggccggatgtgttccggccttttttcagcttatgactgaaccccgagctcctgctgaatgtgcgactgaaaagcctcctgaatcgttttggctacaggtcccggcgctccgcttccgaccggttttccgtcaagggttacgatcgggattaattcagccgtcgttgacgagatgaaaatttcatccgcatccctgagttcgtcttcggtaagagccttctcccgcacctcaatcccgttttctttcatcagctctaacagtttcatccgcgtaatgccgtttaaaatcagctcatttgcaggatgcgtccggacagtgccgtttatgacggcgtatacattggaagaggttccttccgtgaccgctccgtcccttatcagcaccgcttcataagcgcctgcttcataggctttttgtttaatcatcacattatacagtaaattcagactcttaatgtcacacctcagccagcgtttgtcttctgccgttatggcctgcgctccggctttttgttcattttccggttttttcactgaaaaggtgtatgcagtcgtctgcggttccaatccttcgtcatactggtgcttccgcggcgccttccctctcgtcgtctgtatatagaccccgccgtcaatgagtttgttttcctgtacgagcttttgcagatcccattctatgtcctctgcggagaacggcagggtgatgccgatttctgcggcgcttctgaaaagacggacaatatgctcacgcagaccgaataaggcaccgttatacactctgatgacctcatacacaccgtcaccgaattgatatccgcggtcctcaatatcaactgccgcttcttcacgatcaatcaactggccgtttactaatgtcttcatgtaaaccctcctcatcgttatctgccgtgatgtgcattctcagctgttattgtcaactattctatcatactgaacgagccggctgcggagtttatttttttcttaaaatcttattattcgacatcttttctatgtcttttccagttttgttcctgtatacttgattcgacatacatatgctgttaacttatggcacttcgcaagcctccgctgttatcggcattatgcagaaacttatgctactggagagattgttatgcgcaacacaaaagaaggtgcttccccttccctgttttcattggcttttaaacttacgagtttagcagttttgtgcggactgcttctggtaatcgtcataatgggatattccgcttccgccgcaaaaaacaaacaggtcaccgtgaccgcaaacgggcagcttcgggatgaagcagaaagcctgcggctgaaaaatgattctcccgacgtcttaatgaaacatttgcagagagagcgtgacccagggaaaaaaacggtatatttaaccttcgacgacgggccgtctccatatactgaacagctgttgaatgtattgaaggcaaatggcgcaaaggccactttttttatgcttgaaccgcggatgaaagcctataagcattccgtgcaaagagcgaagcaggaaggaatcgcgctcggcctgcacggcgtgacgcacgataatcacctgttttatcaaacaccgacatcaccgctgaacgaaatgcagcagggacgcgatacactcgaggcaatcaccggagtaaaaacggatcttgtccgcacgccttacggcagtaaaccgtcattgacggatgcccagattaagaatctcgaaaaaggcggattcgtgtactgggactggacgatagacagtgaagactggaagtacaaaaacgcacggtacgtgccggaagtattgaatcagctcgcatatttggaaagcgttcatacgagcaggccgcatgtcattttaatgcacgatctgcctgcgacggtgcacgctttgccgagcctgatccaaaaactgaaagcccagggctactcctttgatgttctgacggatcaaatgattcccgtccatgaataagaaaagccggagctgtatatgatccggctttttttatgtcgcggcgctgatccgttttgcaaattcaccgatcttctcatggatgacaagatcaaataaatggtcgcaatatgtcggctcaaggttaatgatcacctgcttcaaaccgggaatccgtcccgcatcctcagggacaaaccttgccggcgccacttcaagcgaagtgccgatcacaagaagaagatcagctttatctagcttttcataaagggtttcaaaatgctgaacgagatcgccgaacagcacgacatccgtttttaatacggtgccgcataccgcatgatcaccgatttccgccgtacattccggcacttcgtccttcagcagatgagaaagcccgtagcgcgctccgcagcgggggcatgcggcggtctgaattgaaccgtgaagctcatagacactgctgcttcccgctttcttatgcagcccgtcaatattctgcgtgaaaatgtctacctgctttccccgcttttcaagatccgccaaatacgtatggccggcattcggctcatagcttccgctcattttcatctgaaagagctgtttgaatttaggccagaattcacgcggacggcgttcaaagtattccctgctcatcgcttccattctggatgtgtcttcggtccatataccgcccgccgaacgaaaatcaggaatgccggattccgtgctcattcccgctcccgtcagcaccacgatacgttccgcctgattgatcaatgtcataaacgcttccactcttccaccgccttttctttttatcatatcatgaaaaaagaacggcgcctgttatgcccgttctttttctccggaatgatccttcacatgaaccggatcatcgtggcttttctgttttacgaatacattctggcccggataggcgaattccacgccttcctcagcaaaaatatcaataatccggcggttgatatcctgccgcacgtccaagctttccgcccagacgatggtctttgtgtaaaagttgaaaaacagattataatagctgtccgcaaacacgtcaaagttaaccataatcgtatcatcatgcacgccttcatgttcacgaagcatttctctgagccttgtgatgcaccgctctaaacgatcaatcggcgtcgcataagaaacacgaacggaaaacgtgacctggcgcttcgtcatcctcgtccagtttgtgatggcttccatggacagcgttgaattgggcacggtaacaagcgccccctgcgccgtccggaaccttgtgcttcggaatgtgatatcttcaacgccccccgtcacagatgacgtctcgacccagtcgccgatcgtaaacggcttttccgtaatgatgataatgccgccgaaaaaattgctgatcgtatctttagccgcaagcgcgaaggccaatccgccaagtccgagtccggccacgaacccgtttacatcataattgaattcctgcgcgatcacactgacgctgagcgcgagaatgacaaagcgcagcaccttggataaaaacggcgccaaaatgtcatccatatcaagctcaaaacgctgattgactttatgaaataaaaacgaagacgccgatgtcagattgcaaagcccccaggcgatcagcgcaacgatcagagagcggtacaattttttgacaatgtccatctgcccgtctaaaaacggcgaatactcaatcgccaaaaacagacccagcgccacgaaaaaccatctggccggcttgtcaaacgctacggcaatctgtttgaatatgtcggttttcggcttgttcgccaatttgtaaatgagctgaaaaaagtatttgacaaacagttttctcaaaacgagaaaagccgctaaaattccgatgctgatactgatctgcaaaatatggtcaagagtaaaaaagctctgaaattgtgtcatcatggcatatgctcctttgtcttgtcgaaaatctattatactaaaacattcggacatcagcttcttttaatgtctttaggcagcctgaaaaaccccggcatcagagcacagccggggtttttcacacattcgttcatctttcagccagatacaacagggtcaggcactatttcttctttgattgtgtctgtttcaggagagtcgctttttggatttcagcatcggtttcggccttaattctttcttccactttcaatctcccttttcccatgatctcgcctcctttttgccattataaatcatcactgcggattgtaaaccgaaaaaagcactatctttattccaaaaaaatactgtttcgcacattcaccagtttgaatcgctgtgcatatacgaatctgatataataacagaaatgcccatgaggggagctgacaagcttgtataccatcgctcatcgcggcgcatccggttacgcgcccgaaaatacatttgcggcatttgatatcgctgccgaaatgaacgctgatttcattgagcttgacgtccagctcacaaaagacggccagattgtcgtcatccatgatgacaaagtcgaccggacgacggacggctccggttttgtaaaagattttacgctgaagaagctgcagtctctggatgccggcagctggtatggggctgagtttaaaggggagcggattcccctgctcgaagaggtcttgaagcgttatcattctgaaatcggttttttaattgaactgaaagggcacgtttctcaagtcggtcttgaaaaagcagtcggccagctgttaagcaggttttccttttccatccaccctatcgttcaatcattcagcctcaagtcaattcagacctttcacgacatgtatccgtccgttccgactgcaataattgcaagacccagcttcgggatgttttccaaaagccagctggccgcctacaaatcagccgtaaattatgtcaatattaaatatacccgtctgaatcggttcttgatttccaccgctcacagacacggcctgaaagtatttgcctggacggtcagaaatcaaaagacggccgaaaaactgcaaatgatggcagttgacggcattgtaactgattttccggattttatttctaaggatggctgatatgaaacaatatatcgcaatttttatcggaggcgcgcttggcgcattgctccgctttgaaatgagcgcgcacattcacagcggttctttcccggcggccactttcctcgaaaacgcggcgggaagccttttactcggtcttattacgggttatttcatcattcgggctaaacgccctcttttgaccgcctttttaggaaccggtttttgcggaggtttcacgacgatgtcaaccttcgcaaaagaaaccatttttctgctgcaatcgtctcccgcagcggctttttgttatgctgccgcgacattaatctctggcattgcccttgcatacgccggcattttctggggacggcgtattgcccttcacgcagcgggaaaggggcatgatacgccatgacgattgtcctgatgcttatcgcagcgggtatcggagcggtattacgttctcttttgggtaaaacaatttcagaaagaacaaaaggttttccgatgccgcttggaatggctgcggtcaacctgctcggctccttcggcctcggcatgttcaccggcctgggcctggataatccttctgccggcatcatcatcgcgacgggctttttcggtgcgtttacgaccttttccacgttcagtattgaagccgtgcagctgatgatgaacaaccgcattaaggaaagcctgctctacatcgctgtttcagcagccggaagccttttggcgttctggtgcggctttgttatgatatccatttaaaaaaaccttgagcttatttttcgctcaaggttgcgttatgaagcatgaccgtttcaggcacgggaagctggcggtttattgttccctgaccgcccgggcggccctgttcttctttgagttcaagctgtttaataaaccggccgtccatttctaatatgagggcagtgtatcccccgatttgtatcgactcacccgcacagatgtcaatattccgtttcagcacaagtccgccgatcgtgtcgacttcctcttcaatccctgcgccgagaagatgattcacctgatcaatccgaacctttccgtccagcacataatggcgttcggacagcttttgaatctgcggctgttcgtcctcatcaaattcgtctctgatatcgccgacgatttcttcaaggatgtcttcggtcgtcacaagaccggacgttccgccgtattcatcagacaatatcgccaaatgaatccgttctctctgcatttttatcagcaggtcgtgtatcgggatcgtctcgatgacttcaatcaccgggcggacgtaagacgtgatggatacttccgctttttcatcttctgtcataaacagcagatctgaaaagagatgcttcgtattgatcatgccgatgacactgtctttgtccccgtccgttacgggccagcgcgtatatttgtctttcagcatcatatcaagcatttccggcacgtccatatcagtggaaacagccgcgatttcttttctcgggatcatgatttccttggcgatccgattatcaaaatcaaaaattttattcacaaacgtatattcagacggtttgatttctccgttttttaaactttctgacagcaggatccgcagctcttcttcagagtgggagccttcatgctcagatgccggctttaatccggccaaaccggtcagaattctcgcggagccgttcagcacccaaataaacgggaacatgaacacgtaaaataaccgaagcggtccggcaatccataacgtcagcttttccgctttttgaatcgcaaccgttttaggcgcaagctcaccgacgacgacatgcagaaacgtaatcagcccgtacgccgcagcaaaagaaatcacatgctcagcagaatccggcagccccataccctgaaacacaggatgaagcatccgctcaaatgcaggctctcccagtacgccgagcccgatggatgtgagtgtaatgccaagctgcgacgcggataaatactcatcaagatccgtaatgatacgctttgcgagcaccgcccgtctgttcccttctgaaatgagctgatcgattctggatcttctcactctgacgatcgcaaattcactcgccacgaaaaatgccgttaacgcaatgagcacaccgattaaaatcaaactgtcaatatcgtccatttcaccttatcccgaattaaaggataaggacgtcacctcctgatttcatcgttttttcttaagcgagaggaacgaaatgggtgattggctacacagagggccccatcctgccacctcctaagtcaaagcatgattgtcatttgtatagtttattgtatcacaactccattctttcatcattttcagatttttatcatataaaaaacagccttcaaaaagaaggctgccgttatctgctccggaaatgattttctaaacaaagcgccgtattaatccccccgaatcccatgcttaagcttaacgcatggtgtacggtatgggcactcggcccgtcggtcacccactgaaatgaatcgtcaatcggctccgttaagtttcggatcggatgaagcttgttttcccgcatttgcaagagagcagcaatgatttccaccgttccggccgcactcagaccgtgtccggtaatcgattttgtcgcattaatccgcgcgtgcgacaggccgctttcagaaagcgcccggcattcagtcttatcaccgatcggtgaaccggtgccgtgcgggttgatgtaatcgatctcttttgctgaaagaccggcccgctccagcgcctggcggatcaccgtcatttcgccctctgctgaaggattcgggttgcggttcgcatcagaagccatcccccagccctttaagccggcccacgaacgcgcgcccctctgttcggcagattcagcgcgttccagcacaatcgccccgcacgcctctccgaatataaacccgtccgtatgccggtcaaacgggcggcaggcggcttcaggccgttcagcgtatgtatcagtgcccatcgctcccaaagaacggagagcatgacactccatgtacgacagatcggccagcgccccgatcacgatgcaccggtcaaacaggccgcctttgattccttgagcagcctgaataaccgccgcctggccgctggccgacgcgccgccgaccgtaaaggccggcccttttatcccgaattgctccgtacaaagccccgacaaatcactatccataaaagaaagcccgtatgtcggatttacaaattgcggcgtttcaccgtttttctcaaaggcctgcagcaattcgcgctgcgtcatattcgagccgccgatgatcagaccggtgcggctgtggtcagcgccgtctaattgagcgtcatgccacgcttcatataaagcgataagcgccgtctttcctgataatgcggctcttcggtacaagcgcttggacagcgcgtccggcggcgttaattcgctaagctccgcgccgataaacgaactgcctttctgccggccgggccgtttcatcacatcaaaggcgtgccgcccctccatgagcgcatcgagaaacgcctccttgccttgtccgaccgcggttaagactccgattcctgtaatgctgatgtctgacgtgccattatttctcctcgacatttgtccgttctcccatctttatgtattggaagctatgaagaaaaatcttgatacagtgctttgaaaatatcgcgcgactgtctgatctgttctgaaggcacgctgaaagataatcggaaatagccgctttttccaaatccgctgccgggtacgatcaatagtttgtatttctgtgcggcatgcatgcagaatgccacctcgtcttcaatcggtgatttcggaaagacgaaaaagcctcctttcggcatttcaaattcgaaaccggcttctgtgaggatgtccaccataaggtctctccgctttctgtaaggttcagcgtcaatcgaaagatcatccattttcgccacggcgcgctgcatcatgaccggagcgttcacaaagccgagcgtccggttgcagaaaacgaacgcatccgtcagaagatcgccctcaggcatttgggcgtctgccgcgatatacccgagcctttcccccgcaatgccgagatctttactgaacgaactgactaaaatcacgcggtgatacgcctgaaacggattcgcctgctcttctccgtagatcagctggctgtacggttcatcaaataaaataaatatgctttggccgttccgctcttcggcttcttttaataaagcgcccaattcgttaaggtttttctggctgagcacagtccccgtcggattatgcggcgtattaacgatcagtcctttcgtacggggggtgatcgcacctttaaccgcttcaatatcaatctcaaatgagtcagtcagcgggcagatgacgggtctgccgcggtaattttcaacatacgctttatattccgcaaaataaggcgaaagaaggatgacttcttcctcggggtttaaaatgcttttcagcgcgacattcagcgccccgccggctccgaccgtcatgactgtatgcctggcggaaatttctgtctgaaaccgctctgacaaaaagcgcgcaaccttttctctcgcctccggaagcccctggttttgtatgtatccgtgccgccctgtttcagccgcttcgcaaagcgcctttttaaatgtttcaggcggctccgcaaccggatttcctattgaaaaatcaaacaccttatcggcgccgaactcttttttcagccgagcgccttcatcaaatagtttgcgtatccatgaccctttctccagattctgtgtcacttcccgtgataaaccggccactgtcatctgtcccttctgtctttttcttccgtttctatttacaatgattatgaaagatttacatggcgcagtcaacgatttttcagacagcccgccgcgccgtttcaggagaaagacagaaaacaataaacttgtgcaaactccccttcatatattaaactattctcataactataacgtgatggttggggagggatttagatggggctgagacttatcgcatcagtgaattagcagagcttgccggtgtaacgaaacgcacggtggattactacacaaacctcgggcttttaaagcctgacaggtcttgctcgaactatcgttactacgatacacttgcacttaatcggttaaagtttatagtcgcttgtaaaaagcagcgattggccctgtctgatataaaagatcgactggagaaccagtttccctcttcagccctgcctgacgatattggaaatctggcatcggaaattgatcacatgaatcaaaacatctccgtgatcttgaatcggtttgaaaagcttgaaccagaggagcgtgcccagctgaaaaaaaggctggctcctgaaaagcttgcagtgcttcaatcatttatgctgctgttaagttaaaccattatcttactaacaggaggtgttaccttcatcttcccaaaagaagtgaaggttctaattggacattgtgaatttgattttagtcgcggttttaatcgcgctgacggcatttttcgtagcatctgagtttgcgataatcagaatcagaggctcacgggttgaccagcttatagcagaaggaaataaagccgcaatcggtgtcaaaaaagtgaccacgcatttagatgagtatttatcggcgtgccagctcggcataacattgacttccatcggtcttggtgtcttaggcgaatcaacgattgaacgcttgcttcatccgcttttcacaaagataaacgtaccaagctcattatcgcatattatttcatttattctcgcctatgcgatcattacattcttacacgtggtcgtgggagagttggcgccgaaaacagtcgccatccagaaagcggaagccgtttcaatgctgttttcgaaaccgctcatttggttttaccgcatcatgttcccgtttatctggcttctgaacaactccgcccgtcttttaacgaagacgttcggtctggagacggtgtctgaaaatgagcttgcccactctgaagaagagctgcgcatcattttatcggaaagctataaaagcggtgaaatcaaccagtctgaatttaaatacgtgaacaaaatctttgaatttgacgacagacttgcaaaagaaatcatgattccgcgtacggaaatcgtcagtctgccgcatgatatcaaaatttctgaaatgatggacatcattcagattgaaaaatatacccggtaccctgtcgaagagggtgacaaagataatattatcggcgttattaacattaaagaagtgctgaccgcctgcatcagcggcgaagtatcagtcgactcgccgattaccgattttgtcaatccgatcatccatgtgattgagtcggcaccgattcacgatctgcttgtaaaaatgcagaaggaacgggttcatatggcgattctgtcggatgaatacggcggaaccgcggggcttgtcaccgttgaagacattattgaagaaatcgtcggggaaatccgtgatgaatttgatatcgatgaaatcaacgaaatccgtaaactcggcgacggccattacatgcttgacggcaaggtcctgattgatcaagtgaacgaactcctcggcatccatttggaaaatgacgaggtcgacactatcggcggctggttccttacccagaaatacgacgtcgaacaatacgactcgattatcgaagaaggctgtgaatttatcattaatgaaattgacggccaccacgtcgcatatatcgaagtgaaaaaactggcgtttgatgaactgctggaaaccgccgaacaaaaagaagcataacaaaaaagcttgcgcgtctgatacagacggcaagctttttttcatttacagttgttcaagttttttctcaagctctttaattctggcattcagctcttctgtcatggccgcaagcctctccttcggcgcaagatcggaaaagtcctccaaaaaaatcggctcgccgatgataagccgcatttttccctttttaaacagcgcttttcccgtagacggccctttatatgcggccggaacgagcggcgcttttcccatttgggcgatggtcacggcccctcttttcagcgggacgtcttcagatgttctcgtgccgctcggaaaaatcccgacaatctttccttccttcagaagcttaatcggcgttttaatgctgcttgggcccggattttcacggtcaaccgggaacgcgtgaatcttcttcaaaaaacgtccgatccactttttctgaaacagctcttttttcgccatataatgaatctgatggggcaatatcccaacaccgagcgtgaggacgtccacccagcccgcatgcgtgcacgcgataacgaatcctttatcagacggaagattctctttattgtacactttcactcctccgcgcagggatagaatgcatttgatggcatttgcacaaaacttatacataacgcacttcctttgttgtaatgatcaaaagtgttctctctctctattataacaatattttttattacctggtactaataattatatttttcctccgccgatctctatcttttatgacggattttgggtactatagagaaatggtgtttgatgaggtgaaaatgaatttaagccgtttgcatggaacgtgcaactttaaacctttcttatgcgtgtataacatagaggggagaaaaggcagtgacgatcgatgaaatttaccaaatgtatatgaatgatgtttaccggttcctgctctccatgacaaaagacaagcatctcgctgaagatttgctgcaggaaacctttatgagggcatacatacacattcactcctacgaccacagcaaagtaaagccatggctttttcaagtggcgagaaatgcgtttatagattatgtcagaaaacataaaaaggaagtgaccatttccgatgacttaattgggagcctttttcagacggctgttcaaagcccggctcatcagattgaaatcaaggaagtgctgacagggtatatgtccgaacttcccgacaattatcgggaggccttaacactgtattatttaaaagaactgaattacaaagaagcatcccatattatgaatatttcagaggctaattttaaaagtgttttatttcgtgccagacagcggctgaaagcactttataatagaggtgttaatgatgaatgaagaatttaaaaagcgtttttaccaatacaaaaatggagaaatgagcgaccgggaaatggccgcctttgaagaagagctggaaaagctggaagtctatcaggagttgattgaaagcgaaatgcaggacgaccgggaatgggacgtcggcatcagcccggaaaaacagaaggccattttatcatacggaaaacgcaaatcgtatttgcggatttcagttctcgccgtcatctccactttgatgattttgccgctttgcacattaggaagctacctctattacggtctgggaggaaaagaaagcaccggcaatcaattaatggagaccgcggcagtgacggtggcgaccacaatgccgaacgtcctcgtcgatacctccggactgaaaagccaggtgaagctgtttggaatgaatacggaatttccgctgcaaaagcagatcggcacaaaaacgaaatccgtcggcggagaacggattgaaatgtttttagatacggtcaaatcgcctgccgttaactactatgatctagacgcggcacaggcaaagcattatttcgcccatccttccggcttaaaggaacgcacgattgaaaaagccggacagacattaaaaaaattgcctgaaggaagcgtggcggaggtctatctttcttatgacagggcctacccttcttctcaagtatattcgacttttaaaaaatacgatgtgaagtttttatggaacgcggtcgaaacggagaaaaatctgaaagacagtccttatgccgagccgttaggatttcccgggaaagattccaagatggtgtcctctttcgaaacgcaaggacagacagaccgtgaacaatttatcaatgcccttgaatttatgtcccgccataaaaaatgggcgcatgcaatatcgaaacgcaaagacatgaatcttggcagccgaatcgactatgttgaacatcacggaatgaacgtatacggctctgtcgtgacggggccgacaaaagaaatcgaacgtctgctgaaaaacaaaacagtaaaagcagcaaacatcggtgaggtggaattatggaattggtaagaatttttaaagagcataatgttttcggctggatatcagtcggtaccgcgattttgtcgctgctgcttttgaacgtggcaatcatcagcaatgtgactttctattcttatcagatgctgccgtttgcgatggccgccgtgccgttcggcatcattgagctgtttattaaaaaaggccggacgggcccgggactgctcggtgtcattctcaatctgttcgtcattgtctgtgtatatacgatcgttgccgttgatacgaatctgcaattcggtttttaaacataaaaacaggcccttttacgggggcctgtttttttaaaatgaaagaacgccgattaaatgcagcaatacgacgatgatagccagcggcacgagatatttcagaaggaaataccacacctgaaagaaacgatagccgatggcggaaccgcttttcatctcggcaaacagctcctgcttcggtattttcagcgggacgaagattgatattaataaagcgccgagcggaatcagcacattgctgacggtgaaatccgcaagatcaaaaaacgtttttccgaacaaatgaacatcaccgagaacaccgtatgataaacaggacggaattccgactaagaaaatgagcagaccgcttgtccacgacagcttctttcttttcgtttcatcacctttccccacagtcgccacgataatttccaccatcgaaaaggccgaagtcagcgcggcgaagaaaaagaccgccaaaaagctgataaaaaacagcgagccgaacggcagccggtcaaacacagccggcagcacggtaaacagcagtgtaggcccttcatccggtttaaagccgaacgaaaaaaccgccgggaaaatggccagtcccgcaaacagcgtaacgagcacattcatcataacaatggaacccgccgaacccggaagattttgggttttcggcaggtacgaactgtatgtcaccatgaccgaaacaccaagcgttaatgtaaaaaaagcctgtcctaaagcatataggatggattccggcgtcaaatcttcaaagtgcggaaccaataaaaatctaatcccctcaacggcatgatcgagcgtgactgatcgcagcacaagcaatagaaacagcacgaataaaatcggcatcagcaccgcactgacacgttcaatccctttctgcacgccttttgcgacgaccgccaccgtcatgatcataaatacaagctgcgcaacgagagtctggatcggattttcaatgaccgtcccgaacaccgtgccgtactgctcctgagtgagcccggataaagaaccggtaacggcttttaacacataaagcaaaatccacccgccgacaacactgtaaaaagacaaaactaaaaaacaggccgccacacccacataacccgtaaggtgccataccgacttcggcgcggcttgtttgtaggcatcaatcgcatttgtctggctccgtcttccgaaaataaattcaccgagcaaaagcggatagcctaaaagcacggtaaagaggacgaatataagaaaaaaagcgcctcccccgttcgtacccgctacgtaagggaacttccaaatggctcccaggccgatcgccgaaccggcagcggccataataaatcctatttttgaggcccattgaacccttttttggtcagacacgactttccacttcccttccgccctatattatcccttattcgctgcgataacttaagcccatttcaatatgtttcattattccgaaaaataaaaaggagcggcgggtgccgctccttacaaatccccgtttaatttcgaatgctttctcgaatataagaaataaatcaccagaccgatgatcagccagataaagaaacggaatatggtggtggcgccaaggttaataatcaaaaacacgcagaacagaatggacaatatcggaataaagggaacccccggacatttaaaagcccttggcagatcaggctgtttctttctcaatacgataaccgccacggaaatcaggacaaatgcggcaagcgtgccgatgttcaccagcttcgccagttcatcaagcgggacgagcgagccgagtaatgctgacaggatgccgaacacccatgtcaccacgtgcggcgttttatgcttcggatggacttttgaaagcgctcccggcaccaaaccgtcacgggacatggcaaacatcaccctcgtctggccgtacagcatgacgagcatcaccgttgtcatccccaacactgcgccgatatcaataatcccggccacccaattctgtccggccatctgcaggacgagagacacgggatggtcaacgccttcaaagcgggcaaacggaacgacgcccgtcataatcgccgatacggtcacatacagcacggtgcagacgattaatgaaaagataattcctttcggcagatccttcgccggatttttcgtttcttcagcggcggaagagacggcgtcaaaaccgataaaagagaagaaaacgagcgccgcggcactgaaaacaccgctgaaccccatcggtataaacggctgccagttgtgaggtttgacatatacggccgcaacggcgataaacaatagaacaaccagaacctttaaaatgaccataatattattgacccgcttcgattccttaatgcctaaatagagggggaatgtaatcgcaagcacgataacaaatgcggggagattaaagaatgtgaccgtgcctttaatggatcccggcgcggccgttaatgcggtcggaagatgaatgccgaagcccgccaagaatgattgaaaatagccggaccacccgaccgaaaccgcgctgacggcgagcatatattccaagattaaatcccatccgatgataaacgcgagaagttcacccagtgtcgcataagtaaacgtgtagacggaacctgaaaccgggacgcttgaagcaaattcggcatatgacagagccgcaaataaacacgcaagagcggcgatgacaaatgaaacggtcagccccggccccgccgtgacagcgcctgttccggttaatacaaaaatccccgttccgatgatggcccctatccccagaagggtcaaatcaaaggcccctaactctcttttcagcgacttttccccgcccgttgcggcaagcaggtcctgaatgcttttctttctgaatacgctccccttcatctgcttcactccttgtaaattaatatatgttagaatattcagataacaatagcaataatgactaaattcttatttttcgcatgaaatgtttcagcacatcatccctttctcctatgtcatattatagcgaaaaatataaaaatgaaaataacttttttgaaaattctatatattatttttagttttcataaaacagaactcagcggattctccactgtgaaatattaacattagtgattcagctggcgacgtccattttttgaaaatcgtattcatatgtacgttcaaataaaaatcccgcactctttaaaagcgcgggataagacttgcgtattatgttgaaataaatcttccgccatttacgtgaatggtttgccccgtcatataggaagattcgtctgaagccagaagcacgtaagctccggcgtgttcagcaggctgtcccggtcttcccatcggagtgtccagaccatgcttttccaccttttcttcagtaaacgttgccggaatcagggcggtccagatcggcccgggggccaccgcatttactctgatcccctgatcggccaatgacatcgccattgaacgcgtaaaggaaacgatgccgcctttcgtgcacgaatagtcgatcaatgatgtgtctccctgataagcggtaatagacgttgtattaatgatggcgctccctctttgcaggtggggcagcacggcttttgtcatatgaaacatagaaaacatgtttgtacggaatgtcttctccagctgttcagctgtaatatcaagaatcccgttttgcggatgctgctcagccgcattattaacgagaatatctatttttccgtagtgatctaagacttgccggaccgccttctgacaatgcgcctcatcaccgacgtctcccggaattaacaggcattcggcctggtattcttccgcacgctttttcgttctctcggcatcggcatgttcgtctaggtacaggatggcaagatccgccccttccttcgcgtaagcgatcgcagccgctgcgccgatgccgctgtctccgcccgtgatgacggcgacttttccttttaatctgcccgacccttttacatccgggtcctccaagagcggtttcggctccatgtctgactcaatgccgggctggcggttttgcacctgcggcttttgtccttccgtctgtctgtccatcggattcatattctcacactcctgcaattggtattactgaaacgataccacgcagcgcggagagttaaacggacaaatatgccggtgattaaagctgctgagccgtttcgggaaaagcgccggtgtatttcgcagacggcctgtaaatcatgttgtcagcggactgttcaagcacatgtgcgcaccagcctgccattctgcttgctgaaaaggtcggcgtaaacaaatcattgtcgacatcaatggcctgcatcacagccgctgcgtaaaactccacattcgtatacagcttccgtccgggcttatattgctctaacaggcggatggcttccttctccacataaagcgccaagtcaagcgacggatcatttcccgccacctcttcagcctttatgcgcagcgcttccgcccgcgggtcttttgttttgtacaccctgtgcccgaagcccatcaggcgttctcccctcataagcttcgctgccaaatacgcttctgcattttcttttgtcccgatgtcttcaagcattttcgtgacgcctgaaggcgcgcctccgtgcagcggccctttcatcgtacccagtgcggcagtgacggcagacactaagtccgattcagtcgaaacggtgactctcgccgaaaaagtcgatgcattcatcccgtgctccatcgccagaatcatatacgtctcaagcgctttcttttgggctgcggacggctgcctgcctgtcagcatatacaaatagttttcaacgtgtccgtatcgcgcctcaggtgacaacgcttcctgcccttgtttacggcggtatctgtacgcaataatcgtcggtgtgacggcaatcagtttaatcgcttcttccggcttgggcggatatgtaaatgaatctgtgcccaaacctgaaacagccgttctcagcaccgccatgtcatccatttcatccggaagcgtttccagtaagtcgatcaaatgtttcggaagcccgcgctcggctgcaagttcttcctgaaacgcaagcaattgccgctcatcaggaagcgccccgttcaaaatgagatacgccgcttcttcaaaactggattgcagcgcgatatccttcgcgtcatagccgcgatatattaaatgccccttttctccgtcaatgtggctgatcgccgtttctgcacaagtaatccctttcaatccacgataaatcaatttcattcccccttatcctctttctgttattatagtaaatataatatttaaaaaataatgaatatttttaagggaattaattaaaacttttaatcagaggagtgcatctatggattttaaatggcttcacaccttcgtcaccgcggcaaaatatgagaatttcagaaaaacggcggaaacgctttttttatctcagccgaccgtcaccgttcatataaaattattagagaaagaaatcagctgcaagctgtttcagcggagcggccggaaaatacaattgaccgaagaaggaaaagcatacgtgccgtttgccatgaggcttttggaagactatgaaaacagcatggcggaactgcacagggtacgccagggctactcgcacacgctgacactcgctgtttcgccgcttatcgccgacaccgttctcccgtctgtcatgaagcgttatacagaggacaataaagaaaccgaaatgacggtcaccattttcgaatcggaagaaatcgcctctcaaatcagaaacggctcagccgatatcggactgagctgcttaaaggtgcaatcatcttccctcacttgccgccccctgtacaatgaccccgttgtcctcgtcgcgccgcccggccgaaaacccggaacagggaaggcggatgaagtgaaagacctgttcggacaatatctgcttttgacccataaccatcctgactattgggatgatttgctccgccaggtcagaatacagttccctttcgtcaggacaatgaaggtgacacagacgcatattacgaaacgatttattaaagaggggctgggtgtctcatttctgccgctgtcagcggtacgggccgaactcgccgcaggcagcatgattgaaattccgtgcgaattcgcccagatgccgagcgcgggcgcatacgccatcgccctctatgaaaatgaaaaaaagaaaacctttttagattttttatcacattttcatttttaggtgaaacaaatggagctctgtcccgtctaaataaaaaacccgttctgatgaacgggtttctatcgctgctagaatcttttcgcgcccaggtagcgcggtttccagtagctgttattcagatcacttgttgtgacgccgtcagaaccggcatggatgaacttgttgtttccgatgtacacacccatgtgtgaagggccggcctgatatgttgtaaagaagacgaagtctcctcttgacgggctggacacgctcttcattgagctccagtatcccgcagtgctcgttctgccgacactcgtctgtttgtttaacaggtaccagataaatccgctgcagtcaaagccggaagtcgttgttccgccccatacatacggcgtgccgattaaagattgcgcatcagaaatcagcttgtttacattcaggctcgtctgtgcagcattatgggtggatgaaggctgctttgatgacgaagatcctgaagacgttgaaccggaagttgatccctttactttaagaacttgtccgatgcggatcaggtccgtttttaaaccgtttaaactttttaattggtttaccgtcattttatatttattcgcaattttccaaaggctgtcgccttttacgactttatatgtagacgatgatgacttgctgcttgagcttgaacctgaggatgatttaccgttaatcgaaagcgtctgaccgatgtaaatgatatccgattttaatttgttctcagatttaatggaattaattgacgttccgtaccgatttgaaagtccccataatgtatcgcctttttttaccttaatcgtttgcgcagatgccgcgcccgcaaacaaagtcgtccccaaaaccactgccgttgttgctgtaacaagttgctttttcatattttcctccctgaatgattctatctattttatgtgtctcttttttaaagtttttatctgtttcctattataaggttcaatttccactagaaatagacttgacttcccgtgacaaatttcttactaattcgttttagaaaaaagtttttaagggtattaaatatttcaatttgatttcaaacgtgacgaaaaacgagtcaatttgtcatgtttttttcctgtgatcctcgtattttggaaaaacaaagcagtttattttccaaataaccccttgttaaaaaaatcctcgactttttcaaaaaagtgaatggttttcactctttcttgaaaacataactttacaccggaatttacatttctaacaatgtttcacctgaaatttacaggaggaacaggcgctctttacaaacaccccctaccattagacatgcagacacgattaaaggaggacgagtgagaatgagtctatttaaacaggttcgatcaaaacttctgccggcggcagccgtatccgtgctgacagccggtctgattgcgggcgcggggcttcagcactccgaacaggctgcggcaaaaaaacagcctgacaaaaacgaaatcagaaacgtcatcttcatggtcggcgacggaatgggcgctccctatatgaacgcctaccgttcggtcattaacaaaggaaagccttcggatggtatgaaactgacggcattcgatcccaatctcaccggtatgatgatgacttatcctgacgatcctgattccaatattaccgattccgcggcggcaggcacggcaatggccacgggtgtgaaaacgtataacgcggcgatcggagtcgataaaaaaggaaagcgggtaaaatccgtcctcgaagaagcgaaacaaagagggaaatccaccggacttgtcgcaacttcggagattgcccacgccacccctgcggcattcggagcccataacaaatcccgaaagaacatggatgacatcgcaagcagctactttgatgaccgtatcaacggaaaacagaaagtcgatgtgctcctcggaggcggcaagtcaaactttatccgtaaagaccgcaatgtaacaaaggatttcaaaaaagcgggatacagctacgtgacatcaaaacaggagctcaaaaaggatcgtaacaagaagattctcggcctgtttgccgatggcggactcgacaaagcaatcgaccgctcaaacgccgtcccttcattagaagacatgacaacggcagcgatcgacaggctgaacaagaataaaaaagggtttttcttaatggtcgaaggcagccaaattgactgggcgggacatgacaatgatatagtcggcgcaatgagcgaaatgaaggattttgaaaaagcgtataaagcagcgatcgcatttgccaaaaaggacaaacatacgcttgtcgttgccacggctgatcataccaccggcggattgacgatcggcgcgaatgacgataaaaactggcatgttgaaccgattcttgccgcaaaaaaaaccccggcatttatggctgaccaaatcaaagcgggcaaatccgtatcttccgtgcttgcgcgctatacagacctgaaatggtcaaaagctgaaatcaaacagatcgaaacggccgcaaaacaggatgctgacaagagcatctacaaagcgatcattaagctctttaatgcgaaaaccaacagcggctggacaaccggcgatcatacaggcgaagaagttcccgtttacgcatacggtccgggaagagagtcatttacggggcttttaaacaacacggaccaggccaaaaagatttttcacatcctgagacacggaaaataaaaaaaggatgcgggggtttccccgcatcctttcttcttttacagatatctccggtgcactcctttgccgtcatacgaaaacatcacttctctgtcttcaagaacagattcgatgtgcacgctcctgccccacagctggtacagatacggcagcactttctccaaatatttcagatcaagctcaattccctcataccaatgtttaatataaagctcattattcttcaggtaatccccgtcattgacggtcagataaggaaatcccccgttgacccgcatgttcacgagctgatcgcgcacggccttccattctttgtcgatcactttatagtccctgccctgcttttggaataaatacaaatcctcacgcatcacgagatctttcgtcaaataattgcggataaatgatatatccgattcaatttccctgacctcaaacattttctcgcgtccggaaccgggctttactcctgtttttttcatttcatctgtcgggttgtcataacgctcttcgatgtcttcaaaaattttcagccctaaataatacgggttgattcccgtttttgacggctgaacgacgcctgcgttcagcttcgcaaattcgatggcttcatctgaagtcaggtcaagctcgcggataatccgctgatgccaataggatgcccagccttcgttcatgattttcgtttccagctgcggccagaaatacagcatttcttctctcatcatggttaaaatgtcacgctgccacggttcaagctcccgcgaatgttcttcgataaacagcagaatatctttttccggccggggcggaaacggttttttcccttttttctttttcacctgcttcggcttatccattccccataaatcatcgtaaggcgatgacgcggtttcttcttcgtcctcctcttcgtcatcgacgctccacagcagcttcggcctgacgagcgacggatcgatatgctcctgaaccgccagaatggcatctaaaaaggactccacctcttttatcccgtgaattctttcataatgcttaatccgctccgccgcagccgccatactctcaaccatgtcccggttcgtattttgaaagcggcagttatgtttgaaaaaatcacaatgggcaagaacatgggctacaattaatttattttggatcagcgaattgctgtccagcaaaaaagcgtagcaagggttggaattaatgacaagttcataaattttgctcaaaccgagatcataatggagtttcatcttgtgaaattgtttgccgaaactccaatggctgaatctcgtcggcatgccgtacgcgccgaatgtataaataatctcagccggacaaatttcatatctcatcgggtagaaatcaaggccgaaacccttcgcaatgtcggttatttcctcaattgcccgctgtaaaccttttgtctcctccgcgttcaaccgaatcccccctacttggacttatttataatgtatgacccctcctctcaaaagatgaaataacagatcggtttccgtctgaaaactttcggcacacccgccccgtttgctttatatgtaagtgggtaaaacacacaccataccccaaaaagaaaaggagcgattctacttgaatacagcagacatgcttacgacgtatctcagcaaactcccgaatctgatcatcgcactgctcgtcctgcttatcggctggggcattgccaaaatcattgaaaaagccgtatacaaaggcctgcaaaaaacaaaaatcgacgacaggctgttcgccgaaaaaaagccggcgcgctattcctcagaaaaagtcatcagtaaagtcatttattttatcgcattaatcatcgtttttattctattctttaacattctgcatctgacaaccgtggcttcgccttttgtcagcatgctgtcagcgataacggcggctgtgccgagcattttaaaagccggcctgattctgctgttgggctgggcggccgcttcgcttttcagctatctcgtcaaaaaagcgggcatgaaactcgctgaaaacggccggctcagaaaatggacaatggtgtctgaagaagcggagatgagcagatccgttacggccgcttcacgaatcgttttttacttcgtcttgctcttgttcctgcccggcgtcttggccgctctccagatcagcggagtatcagggccgtttacaaatatgatccaaagcgttttgtcctttataccgaaattattcgccgcggcgctgattgttttaatcggctggcttgttgcccgtctcgtccgtgatatcgtcacaaactttctggcgagtatcggcacggaaaggctcgccgcacgtatggggctttctatatacctgaaggatacaagcctgtcggcaatcatcggaacgattgtctacgtgctgattttcattccggtgatcatttctgcgcttgaccggcttgatgtggcgggtatttctgaaccggcgtcagccatgctgcacacggtcttcacaatgctccctaatatcattatcggtatcgtgctgatcatcgccggcatctggatcggaaaatgggtcaacagcattgtatccgggctcttgcaccgggccggtttcgactctcttctcggtaaaatgggctttgaacagacgggtaccccgaagctgacgctttctcagacggtcggcatgattgttcagattatcatcgtcctgctgtttacggcagaggcgctgcagcttgttcatctcgaatttctcgtcgttatcgcaacaggtattatcgcttacctgcctaatgttctggccgctgtatttattctcggaatcggacttttggccggacagctcgtcagcagactgcttgccggcatgctgagcggaaaggaattcagattcctggcgccgcttgcgaaatataccattatcactctttcaatctttatggcgctggatcagctcggtgtcgccgacacgatcgtaaatgccgcgtttattctgattctgggcggtttcgcgcttgccttcggactttcattcggtcttggcggaaaagatttcgcctcccgttatctcgcaaaattggatcgcaaaattgaaaaacatcaatcggctgacgatcggaagccgccgatgtcttaacgaaaaaaacgtgcgctcagaaggagcgcacgttttttttttgagttaagggggcaaattccttttttttcattttagattcatatatgatagactgtaacagaagcaaaatctcttttttcgaggtcattctatgaaattaacgaactataccgattattctttacgcgttttgatttttttggcttccagacattccgatgaactttccaacataaaagaaatcgcagatacttattccatctctaaaaaccacctcatgaaagtcatttaccgcctcggccagctcgggtatgtcgaaacgatccggggccggggaggcggaatccgattaggaatgacaccggaagacataaacattggagaagtcgttcgaaatacagaagacgactttaacatcgtagaatgctttgactccaaaaaaaatctctgtatcatatctcccgcctgcaacttaaagaaccttttgaatgaagccctgcaagcttacctggccgttttagacaaatatacgttaagggatctggtcaaaaacaaagaggagattatgagactgctcagaagctgaaggaatgtccgcattccttctttttttttatgccggcataagaaaaaaggactatttctattaatatgataaacgattgcagacaagtgccgatataaagattatcattactgatatcctcaccttgcggctgcaacgaatggggatagtaaaatcatcgcaggaaaagggagattcattatgaaaaaaaaggtagcggtcggtttgactgcatctgcgatcgtcgggtctgcgttagctgtaacaccggcagaagcacaaacgattaaggttaaaagcggagattcattatggaagcttgcccaaaactacaatacaagcgtggatgccattacatcagcgaatcatctaaaatccaccgttctttctatcgggcagacgctcaacattcctaacggcaaatcagattccggcagcaaaaagccatcttcaaagaacagcggcacgactaaaagcgtttatacagtgaaaagcggcgactcgctgtggctgatcgcatctgattttaaaatgtccgtacaggaactgaaaaaattgaacggtctgacaagcgacttaatccgcgccggacagaagctgcaagtgacggggaaagtttcctcaagcaccgatcagaaaaaaaccacgccgggcagcagctcaaacagcagccaaaagcagtcatcatcttccgggacgtataaagtcaaactcggcgattcactatggaagatcgcaaacagcgtcaatatgaccattgcggaactcaaagtattaaacaacttaaaaacggatacgatctacgtaaaccaagtcctgaaaacaaaaggaacgtcttcttcgggaaacacgccgtcaaaggacaattcaaaccaaaataaaaaccagacgcaaacgtcctcctatacagtaaaaagcggagactcactctggaaaatcgcaaacgcatacaatatgacggttcagcaaatcagaagcatcaacaaactgacgtcagacatgctgcgggtcggacaagtgcttaagctgaccaaaacgtcatcttccggctcttcgacttcaccgtcaactccgaaccagtccggaaatacagggaaaaccactacatataccgtgaaaagcggggattctttatgggtgatcgcccaaaagttcaatgtgaccgcccagcagatccgcgagaaaaacaatctgaaaacagatgtacttcaaatcggacaaaagctgacgattaccgggcagcagacaaacacgactccgaatcagtccggcaacacaggcggcacaggttcaacaagcgcgaagattaatgtaatgatcgatgccgcaaaagctcagctgggcgtaccgtatgtatggggcgggacgacgccgagaggctttgactgcagcggtttcatttattacgttctcaataaggtcacttctgtatccagactttcagccgcaggctactggaatacgatgacatcagtcagccagccggcggtcggtgactttgtctttttctcaacttataaagccggaccttcccacgtcggtatttatctcgggaacggccagtttattaatgccaacgattcgggtgtcgttatttccagcatgaacaattcctattggaaacagcgttacctcggcgcaaaacgtttcttctgatatctgacaagctgtacggcctcaataaggctgtgcagctttttttacagtctgaaaatattaatgctgatcacgtgttttgttacgggatggaaatacacttcagcacgggatgaaaacgtttcttttgctgtttgcaccgttacgcgaaacacatctttcgtctgttcccggttcacttttgtacggcccatgtacgaataatcggtaagctcggcccccttgtattcacgttcaagctggttccatgcgagctgctcccatttttcaactgacggatcaaggtgttctgtatgccctttttcagcgatcgaggcaatgagaatgccgcaaaacaagagggcaagcacaaatggaagggatttcatctttatgttctcctgagtcgttttttgtcaatcttagcgtgtccaaagaagagacggatatgcggttttattttatgtctccctcatattgctatgccgctgtgataaggccaccaacttttcccccgttgcatcgggcttcgacggcataaactaacggagaacttctcattgaaaggagaagcgttagatggatcatgccgattatgacaaagccttgtattacacacaccggtctcaatgggacaatttgttaatattgatggttcgtacaaaagatgatttattatcaaagcgtattgagcactttctgcacgcgtatcatttcgaatatgatcatgcggtgcttgaaaaagagctgtattctcttctcgggtatattgatcatgcgacagagctcgcttatgaagatcaattagccatgctgacataaaaacaatcccggcgtcagacgccgggatttcttatgtttgtgaacatattcagctcttcgatcatctctttcaggctgacagccatatcctcagatacggtccggcgctccatgtcgatgtgaatcgggtctaagaccagctgtttcgggatgacatttgcatagacgccccgcatgaccgtccgcatattcgccagcgcgttcatgcctccttttcctccgcccgccgcggccatgattgccaccggtttgtatgcccagtgatcgctgcttaaaaaatcaatggcgttttttaaagcgccgctcatgccgctgtgatactcgggagataataagacgacggccgccgactttttcacctgccgccttaactcttgcactgaaggcagctcgttctgttcttcttcaccgttataaagcggcagatcactttcgctcaaatcaataaaatcggtatgaaaccgatctcttatataagaagcggcaattctagtccgcccgttttttctcggtgtgccgctgatcactaatatgctcatgattttaccgcctttccaaaaacattatattttaccgcatacaatgccgcctgcgtccgatcggaaagattcagctttgacagcaggttggacacgtgggttttcactgttttttctgaaataaacagtgccgccgcaatttccttattgcttttccctttggctatttcttgaagaacatctttttcacgtggggtgagctgatcatatttttccttatcctgatcatcctgaaccatatgggtcagcacgtgaggcacaatatccgccgacagccggtaacgtccggaatacacttcccagagcgttttcactaaatcatcgggctgggcgtctttcagctgatacgcttttgcgccggctttaagggcgggaatgacatgctcctgatcagaatagctcgtcaaaacgacgatactgatgtccggaaatcgttcagccgcaatttttgccgcttctatgccgtccatatcaggcattgataaatccatcagaatgatgtccggctccgtcttttcagcttgctgaagcgcttcagcaccggtggacgcctcaccgacaacttcaatgtcttcctgagtggcgaagaaatagcgcagtcctttgcggacaacgtgatgatcatcagcaatcacaattttcatcaatcagacctcctgtcccgaaacggaagccgaacggagacaatcgttccggcaccaagatcggattgcagtgtaaagcggccgccgattgcttcagcccgcgctttcatgccggccacgccgagcgatgggagcacagcatgcgcatcagcgctgaagcccgctccacggtcgctaatatgaagctccgcgcaatccggctttttaacggcggaaatgataacccggtccgttcccgcatgctttttacagttattcaaggcttcctgggcgatccgccaaagcgcgtgttcctgttcatctgtaagctccagctcatcctccatttcacaaacggcttccaggccgataagagcggcatagcttttgatcgacgcatacagccctttcgtcaaactttccggcttcagctgccaaataagcgctctcatttctgttagcgcattctgagacagctcttgaataaacgtaatcatctgccggagccgatcatcatctgtaaagctctttgcggcttttgccgttaagctgacagaaaacagcatctgattgacggaatcatgcagctcttgcgcaagtctgcttcgttccatcaacagggcgttctgctgctcaaattcggccaatttcatccgctgaatcgccgttccgatttgaaatgcaaccgcttcaagcagatgcagttcttcttcgttgaaaaatgtcttttcgcttgcggcgacgtttaataaaccgaacttccggccgccgtcctcaagcggtacggtcgcatgatgggtaatgccctccgtatcgcggcagttcgtcgtctgttccgcaaattcaatccgtttacaattcattatgtttacggcctttgtcaatccgccattgctgaatttggtcagacaatagcattccccgctgcacatgagtgcattttcccgctgaccgagagccggcggtaaataagcggatgcggcgagcgtataagatccgtccggctcaatcagaaaaatccaccctgtctgcagcccggtcaggctgagcagttcgcgaagcactttatcaagcgcttcctttaaatcgtggctttggtttaaggtttccgcaatcgcttttaacgtttttaacgtttctaccgtcgttttcgtcaatttccctcactccggccaatcagaattatccatattatatcaattcttttctgtatattcctttgttttcagcatgaattttcctcatactttcggatgaggggtataaaaaaaccgccggatgtcgcttccggcggtttgttgtttatttcgttttttccactatgccatccaccgttttcatgacagcttcagataatgcggcaagacgctgttcgctgtcttgtaaagaagttcccttcacggcgaaatagaacttcactttcggctccgttcccgatggacgaaggcagaaccaagagccgtcttcaaggaaatatttcaggacatttgacttcggcagatcaatatcttcttcatgatgatcggcaaatacagtccgttttcccgttgaatagtcttcagcctgcgtgatttgttttccggccatctgcttcggcggatcgtttcggaaggaagtcaggatagcggaaatctgctctgctccctgttttccttttaacgtcaatgacttcaagccttcacggtaataaccgtattctttaaaaatggacagcagcgcgtcataaagcgacatgccctgctttttataaaaggcgcatacctcgacggctaacagcgcagcctggatcgcgtctttgtcacgcgcgaaatcgccgattaagtagccgtagctttcttcatacccgaactggaacgtgtattggcctgatttttcatattctttgatcttttcaccgataaatttgaagcctgtcagcgtgtcaaccgtatctaatccgaacgatgaagcgacggcgcggcccaattcgctcgtgacaatcgttttcatgacgacaccgttttcaggaagggcgccctgttttttcttctcggaaagcaggtaatgcaataaaagcgcgcctgtctggtttcccgtcagcactgtgtacttgccttcgctgttttttaccgcaatgccgagacggtcggcatccgggtccgtagcgacgagaatatcagcgttttgttcttctccgagtttaatggcatattcgaatgccgcgtgctcttccggattcggcgatttgacggttgaaaaatccgggtccggcagctcttgctccttcacgacggtgacgtttttgtaaccgagtgcttcaagaccgcggcgcaccggtttatttgccgtgccgtgcagcggagtgaacacgacgctgacatccacttcatccgaaagctcgggatgtacggagatggaagtcagttcttcagtatacggtttatcaatttcttcaccgattattttaatcaaacctttttctttcagcgactgttcatcttcaacttgaatcgttaattcattttctatggcattcacttccgcaatgacgatgtccgcttctttcggcggcagctgtgcgccgtcatcgccatacactttatatccgttatattcaggcgggttatggctggccgtcacgacgataccggcataagcgttcagctttctcaccgcaaaagacagctcaggcgtcgggcggagctcatcaaatacgtatgtttgaatgccttgggaagcaagggtttttgcagcttccatcgcaaactcaggagatttatgacgggagtcgtatgcgatcgcaacccctctttttttcgcgtcttccccctgtttcgcgatatacgccgcaagtccggcggatgctttgcggaccgtgtaaatattcatcctgttcgtacccggcccgatttctcctctcatgcctcctgttccgaactcaagatttttgtagaaaaaatcttccagcagctgctcgtttccttctgcgtccgccaataattttttcaattctgaatctaattgttcggcctgattccagcgttcgtaactcttactccaactcatgttcgtcctcctataatttcagcttatgaccatattttaatatgaagcggctgcccgtgtcacttgataacttaaccaaatgctttatgtaaaaagataaaagaagggctcatgccttttcggcacagccctccggttattattgttcgagcggaacaaccgcgtcgtgcagcagcgtatttaaccactcagtgtgtttttctttcgtttcgtcattccattggaatcggtcgctcatgtaatcaatcacggccgttttatacgtttgcacccatttgatgtcgaagaacagtcttcccgttctgcggacgaagaaatcggcaggtgtcgcagccatttcttcttcgatgctgtaagctgcttcagccaaaatgtgaaccggaatctggcgtttttccgcttcgtctttcagaccttcaatccggctgaatacattttcaacgttagagccgtatctgatggctaactgcttagcggtttcctgtggtaaaccgattttcaagccgtcttttgtctttgcttccacaaatgactcgaagtttttagagccgccgacatgtccgccggaaatcggcatcgtcttcgtcttgcagccgccgaagtcctggccgccctcttctttcaagcggtcgcggacaagatcgacaatgtgctcagccattttacggtagcccgtcagttttcctccggcgatcgtaatcaggcctgattgagatgtccagatttcatctttacgggagatctcagacgggtctttcccttcttcgtgaataagcggtctgaggccggcccagcttgattcaatatcgtccgccgtaatgttcagttccgggaacatataattgatggagctgacgacataatcacgatcctgcaccgtcatgcgcgggtgctcaagtttttgtttgtaaaccgtatcggtcgtacccacgtatgtttttccttcacgcggaatggcgaacaccatccggccgtccggcgtatcaaagtacaccgcctgtttaagcgggaatacggattggtcgaatacgagatggaccccttttgtgtgctgaagatgttttccgcttttgctgtggtctttttctctcagctcgtcgacccacggacctgtcgcattgacgatttttttggcgtaaactttgtattccttgcctgacagcagatcttcaattaaaacgccgacaacttttcctttttcataaagcagttctttcactttagaatagttgacaggctccgcaccgaatttaacggcttctttcatgacttcaatcgtcagtctcgcatcgtccgtccggtactctacataatagcctccgccttttaagccgtcttttttgacgagcggctctttttgcagcgtttctttagcagacagcatgcttctgcgctctgatttttttactcccgctaaatagtcatacacacgcaggccgatggaagtagagaatgaaccgaacgtgccgcctttatgaaacggcagcagcatccattccggcgtcgtgacgtgcgggccgttttcgtacacgatggcacgttccttaccgacttctgcaaccattttgacttcaaattgcttcagataacgcaaaccgccgtggacaagctttgtggatcggcttgatgtgccggccgcaaaatcctgcatttcgctcaaagcgactttcattccccttgaagcagcgtcaagcgccgtaccggcacccgtaatacctccgcctataataaacagatcgtatgtttttttagtcatgtcttccagcatatgatcccgttccaaacttgaaaattggtgattcatcattacgtttcctccttgttgtcacggtatagaaaaagagaccacaacagccaaagcgcatgtcatcactttggtgctgtggtctctcctcatctcaggaccgttcctattaacttgttttcagtataccacatttttatcttatttaaaagccatagctgcatttactgcttttttccatccgccgtacaattcatcgcgtttttcatcttccatttccggtttgaattgcttatcaaggttccattgatcagcgatttcagtgctgtccttccagtagccgacagcgattccggccaaatacgcagcaccgagcgccgtcgtttcattaatttccggacgttcaaccggcacatcaagcaagtcgctttggaactgcatgaggaagttattttttaccgctccgccgtctacacgcaatgtttttaaagagatgcctgaatcagcctccatggcatcaagcacatctttcgcctgataagcgagagattcaagcgtagcccggataaaatgctccttcgtcgttccgcgtgtcaagccgaaaactgagccgcgcacgtcactgtcccagtacggtgtgcctaatccgacgaaagcgggcacgacataaacaccgtcagcggaatccacacgctctgcgtatgtctcgctttctttcgaatcttggaacatccgcatgccgtctctcagccattggatggcagaacctgcgacaaagatgcttccttccagtgcatactcgacttttccgtctaatccccaggcaattgtcgtcagaaggccgtgatcagaagtgatggctttttctccggtattcatcagcataaagcagcctgtgccgtatgtgtttttccccatgccttcttcaaagcacgcctgaccgaacagcgcagactgctggtctccggccgctcccgcaatcggaatgtttttaccgaagaaatgataatcaaccgttttcgcgtacacatgagaagacggtttcacttccggcagcattgatttcggcacgcctaaaatatcaagcagctcgtcatcccattttaattcatgtatattaaacatcagcgttcttgaagcgttggaataatccgttacgtgcgccgcccctccggacattttccagatgagccatgaatcaatcgttccgaacagaagacttccgttttccgctttttcccgcgcgccttctacattgtcaagaatccatttgactttcgttcctgagaaataagggtcgatcaaaagtcccgttttttctctgaatgtatcattatatcctttttcacgaagctcttcgcaaatgccggatgtttgtctcgattgccacacaatcgcattgtataccggctttccggtatctttatcccatacgaccgtcgtttccctttggttcgtgatgccgatgccggcaatttgatcagcgctgattccggactcggagatcacagtcgcgataacggcgagcaccgatccccaaatttcgttcgcattgtgctccacccagcccggctgagggaaatgctgtgtgaattccttttgagcggaatgcacgatttttccttctttattaaaaagaatcgctcttgaacttgttgtgccttggtcaattgataaaatataggtctccatgatgccgctctcctttttaaatatattcagaatttgataatgttttctgtgattgagatttcttggtataaatatagagtatgaaaagcactacaaccattataacgcttacaaaccaaaagctaggtgtcacatttcctttaaacgcggcattgtaaaatacgccgccgaacgcaccgcccatgatcggaccgattacgggaatccaggcatatttccaatttgacggtccttttttcggaatcggcaaaaaggcgtgagcgattctcggccccaaatcccgcgcagggttgatcgcatatccggtcgtccctccaagagaaatcccgatggcaacgatgaggaatccgacaatcagcgggttcagcccttttgtaaattcattcgctccgattgccaaaatgccgagcacaagcacaaacgtaccaatgacttcacttatcatattcccaaatgtatgaggaatactcgggccggtcgagaaaacgcccagtttagcggccggatcatccgtcgccttccaatgcggcagataatgaaggtacacaacaaccgcaccgatcattgctccgatcatctgtcctgcaatataaacagggacctctttccaaggaaagctgccttcaagcgcaaggcctatcgttaaagccggattcaagtgggcgccgctgatactgccgacggcatatgccgccatggctactcccaatccccagccgaatacaataacaatccatccggattggtatgaaagcgatttctttaaattgactcccgcacaaacgccgccgccgaaaataacaagcagcattgtaccgattacttctccccaaaatgctgtcatcatcattcctcctaaatgacataatagcaggtttgacagagttatagagaataaaaaacccacaacaaaccgctttacgctttattgcttccgtaaagagctgttgtgggtctccgggtctccatcacatagtattaacctaggtctattgtaacaatgggtgtaagcggtgtcaatctttttttgtcatagaatgttcatatttagcccataggtcggtgtctgaagtcgtcacggccgtggctcctgcctgcaaggcgttttcaacgtcctgctccgtgcggatgaagccgccggcaaaaatcggaatccccgtcatttctttaatttctctgattaaagtcggaacgatgcccgggagaacctcgataaagtcaggcttatgctttccgacgaattccatgcttttctccatggcgctcgtatccaagagaaacagacgctggatcgcgtatattttcttttgtttcgctttgacgatgactgatgatctcgtcgaaatgatgcccgcgggccggatatcctgacaaataaactccgcaccgtattcgtcatgcttaatgccgtgaattaaatcgacgtgaaccatcagaagttttccgtgtttttttgcttcattcacgacaccttttaattgaccgaggtggatatctaaaatgacgccgtataagaacggactttctaaaaatgcatcgaattgcttcatgttccggattgccggtagaatctgctggttgtgaaaactcatgttttactcctttacattaaaaatcaatgctcagcacgctttccttgacggtcgaaatgatgaaagagagctcctcgtccgacaggcaaaaaggcggagacagctgaatgacattattatatcccgctacagtatcgccatttttcccgacaagcaggcctttttctctgcacgcggtgatgacgtgctgcacaagggcggcatcagcgggttccttcgtgactttgtccttgacgagctcaatgccggcaagaaggcccttgccccgtacatctccgaccgccggatgttctctgagcggctcaagctcacggagcagcctttctccaagctcccgggagcgggcgatcagattttcgtcctccatcaattgcaggtttttcaaggccagggcgcaggctgccggattgcctccgaatgtattcacgtgccggaagcggccgtacggctcaccgcccgaatacgcctcaaaaatctcccgttttactgccgttgccgacagcggcagataagcgctcgtaatgcctttagccattgtgacgatgtccggtgaaacgccgtaatgctgaaatccgaacggctctcccgtgcggccgaaaccgcaaatgacttcatcactgatcagaagcgcgccgtggcggcggcaaatgtcctctacctttgccatatacccgtccgggggcatcagtatccctccgcctgtaataatcggttccataataacgccggcaatcgtttcgcttaactcccacgtcatgatccggtcgatttcatgcgcgctttccaatgtgacggcatcgccgggattccgatagagatcaggcggcgccgcgtgcaaaaaaccttgtgagagcggctcatatttatattttctctgcgcctggccggtagcggcgagcgcccccatcgtattgccgtgatagcctctgtaccgggagatgaatttgaagcggctgtgatcgccgttttcaatgtggtattggcgggcaattttgaacgcggtttcatttgcttccgatccgctgttggaaaagaagattacataatcgccgccgagccattcattcaatttttccgcaagctcaatcgcgggttgatggctttgggtcagcggataataaggaagctccttcaattggctgtaagccgcatcggcaagttcctttctgccgtatccgatattgacgcaccacaggcctgacatgccgtccaaataccgtctgccgtcaatgtccgtaacccaggcgccttcccctttttggacgattatgctgtcatccggctccgcccctttcatcgcgtgccaaatcagctctttatccttttgtttgagtgactgatttttttgtacatgttccacaccgctcatctccctttcaatatcattgcactgtatcgaaagctgcccggcttctgacgccgattctcttggtgaagttttcctcttaataagaatataaaggcgcggcatgggcgagtcaataaagcggcggcaattaaaaaaacgctttctcccagaaagcgaaagggctacaagagcatatcccgaaaccggggccggtgcaagtgtttttataaaaaaacccgccccttaagcggagcgggcgttttttttatttcagatgcgtaatccggtaaatgtctttgcgccggtctttcagctggcgcacggttccgttttcacgctgccttcttaagatttcaaggtccacgtccccgatcacgaccatttcgatattcggattcgtttcaccgacgattccgtctctggcaaattcaaaatcagacggagcaaaaatagctgactgcgcgtattgaatatccatattttctgtttgcggcaggtttccgaccgtacctgagatgacggtgtaaatttggttttcaaccgctcgcgcctgagagcagtaccttacgcgcaagtagccttggcggtcttcagtgcagaacggcgtaaagataattttcgccccttgatccgcggcaattctcgcaagctccggaaattcgatatcgtaacagatctgaatggcgatctttccgcagtccgtatcaaatacgcgcaccctgtctccggcgctgatgccccaccatttccgctcattcggcgtaatgtgaagcttatattgtttttcaatcgtgccgtcacgtctgaataagtacgcgatgttataaattttcccctcttcttcaacgaagtgggagccgccgatgatgttgacgttatatttcaccgcgagatctgtaaagaggctgatatagtcctcggtatattcggtaatcctctgaatggccagactcggagaacgctcctcgaggaaagacatgagctgcgtcgtgaaaatctccgggaacactgcgaaatcagatctcgcatcggaagccacatcgacataatattcaacctgattggcaaattcctcgaaggagtaaatctttttcatttcatattgaatgacgcagatgcgcaccggaaatgccgatttgtaatagcgcttcgattgcggcaggtaatcgacattgttccattgcattaatgtcgcatatttaatggacgcggtgtcatccgggagataattcggattgatccgcatgagcgtaaatccgttcatcagctggaaagaaagcaccggatcataaatctgatggcgcgtcacctgttcgacataagctctcgccgtcatttcttccgcatacttatgataattcggaatccgcccgccgataataatgcttttcagattcaatcgtctcgccaagtcttttctcgcctcatacagccggtgtccgattttcatccgtctgtattccgggtgaaccattacctcaatcccgtacagattcaatccgtccgggttgtggttcgtgatataaccgtcgtctgtaatgtcctgccacgtgtggcggtcatcatattcatcgaaattgatgatcaggcttgagcatgaaccgataatttccccttcatactcggcgcaaaactgaccttccggaaagtgcgcgagatggctgattaaatgctcaggctcccacggctccatccccggaaaacaatccttttgcagctcaataattttgttgatatctttctcttccatattccggatgaccattttcttttcaaaacgggtcagatcaagtttctcagacaatgctgcttccccctgccgtttcgttttgatcgttcaatcgctgtaagagtaattcaagttccatttccgccatcgattccagtctgtgatcgtattcttcaaataacagggcgcttgttaccttattcgggacgatgacacatttcatgccggcccgtttggctgcgattgagccgttgaccgaatcctcaaaggccagacattcagatggttcaacgcctaaatgttccgcagctttcagatagagctccggattcggcttcacttcttctacgtcgtcagccgtctgaatcacttcaaattcatcaaacaggcctaattccttcagatggcccgatacccatttaaaatctgagctggacgcgagccccactttcaatcctaattcttttgccgcggctaaataagcctccaccccgggacgcgccgtttccgtcttcatccgctgttcgaagcgcccgcgcctgatcgccgtcagttcatcatgatcgagctttcttcccagctgctcctctaaatatgcgaacggcttaaaccccgcggccgttccgatcacctttccccagacggataaaggcaatgttgaaccgtgttcttcaaacatttcctgcagcacttcatattcatgggtttctgtatctaaaattaacccgtcaaaatcaaagattaatgcttttatcaatggttacagctcctttagctaaacgtactgacctatgtatacactataccgtgaatttctttcgcgttcaaaatgtaacattctcacggaaagaagagcctgcatgagtgcaagctctcttcatccgttactgtgtgttttgactggaaatattggaaagagctgctcccgcagactcatttgaacgctgatcgaccgctaagtctccaagcgcaacgatcccgaccagatgattttgatcgacaatgggaaggcggcggatttggtgttgggccatcagatgtgacgcctcttcaagactcatttccgggtttccggatacaactgtagaagacatcacgtgtgaaacaggtgtttggccgtcgcggccttgagccgttgttctcaatgcgatatcacggtctgtcagcattccttttaattcccctccgtcaacgacgggaattgctccgacattatgctggtgcatcagcgcagccgcttcctgaatcgtttgattgggagaaacggtagccacgtgggtagtcattgattgtttgattgaactcattgtaaagcacccctttcgacatttattatgctcggggatttgtctcattataaagggagttagaggaaagaaattgtggtatcatgtcaaggaagcaaaaaagagcctgttaaaaggctctttatacccgtcagatcagccttctgtgaccgcaggcatctgatccggcccctgtctcgaaatcatcataggtaaagggaaaattcattccgcattcattcagcaaagcgcaatttttatcaaacagcgcccgctctttgacgtcatataccgggtgcggctttgacagcatgatatgtaccgtttgcagacaagccataatttgaaacgcttcttttaaagttccttggtaacgttggttttgtaatgataatacgcccctttttttaaagcgctgaatttccagttcggagaaataaagaggaaagacattttgaaacaattcagaggaaagctcttgtatcgcgctttcttgtccgtcagtcgctgcgttcacaattctcacatcaatcacctttcttgccatgtgaatatccttaatctttatcaagaatagcatagaaaaaaacgcgaaagctaaggtaagtgtttcctattgaaacagccgctttccgcttgaaaaggagctttatgatatgaaacaaaatgaccgcggtctggaactcctgattacggaaaagcacgccggacaatggctgttttcagtcctgaaatctgaattccaggcgtcaaaacccgtaattacggaatggatgaaccaagaaagcattcaggtgaatcgaacatccccgaaaaacaacatcatactgaaaaacggagatcgcttattcattgatcttcaggaaaaaacgggttcttcggtgactccggaatacggagagccggacattttatttgaggacaatcatatgctgattgcaaataagccggcgggaatgccgactcatccaaatgaagagggtcagaccggcaccctcagcaacctgatcgcttaccattttcaaatcaacggcgagcaggcgaaagtgcgccacgttcaccgtcttgaccgtgacacgtcaggcgcggtcgttttcgcgaaacaccgcctggcccatgcactccttgaccgtcagctcgaaaccaaaacattaaaacgcacctatatcgccgcggcggaaggaaaagtcacgccgaaaaaaagcacggttgactcgccgatcggccgcgacaggtcacattccgtcagacggcgcgtctcatccggcggacaagccgccgtcacccattacaaagtgaaaggctatcatcccggtgcgcagcttacattggcagagcttgaactggaaaccgggagaacacatcaaatcagggtgcatatggcaagcatcggccatccgttggcgggcgatgacctgtacggcggaagcaggacgctgtttcacaggcaggcgcttcacgcaaaaaaagtcagtgtcgtccatccgatctcaggagaagaaatcgttgccgaggcgccgatgccggctgatctggctcattttaccgaaacgtatttttcttaaacagggtcggcatatataatatatcgtttcggcgcatttccaatgtaagaaaacggatagcaagtggtcaggatcagttcctcccgcttgtgctgaagggtgatgacagatgtatcatcccggctgacgatttttgtacggctgattttataagaaaacgtgccgtaagacaaaatcacgttcagtctgtctccttttttcagttcgccggtccggcggaacaccgtgtccctgtggccggataacacaatttggccgtgatcgcccggataatagctgtccttataatgtccgacgccttttgctaaatcatctgcgtcagtcccttccacgatcgggagctcagcgtcgatttcagggatttctaaaatgccgcttgcctcacccgtttcggggtgaaattcttttttgcgctgtgtcagcacagcgctttttgtttcgttcttttccaagacaggttctgttgctttttttgcttcttcaagcgaatggttcgttttcatatgtgaatcaatgatcttccagcttccgtaacatgtgatgatgataccggcgatgatgacgaaaagcggaataagtttcagtttgttcatcgtgtgcgggttccccttttctttctgaaaagccaatatacgccggcacccgtgatcaccagaccggccaatgccgtctgatggctgcccgctgaagtatcaggcaatgggcggcctttttgtgtgccgctttcagtctgttttgtgctttgttccgaatttgcggcagacgccggacgggattcgggaattgactgcactgtatcagatgctgtttcttttacgacaggacgttcaggttttttggtttgatcaggctgttctgccgcatccggttttttagcgggtttttccgcttgcggtttttctcctttatcaggcctggtgccgcccggtgtttccccgcttcccggctgattgccggtgtcatcaggtgtttcggcggctgatgccgtgcggatgcggccgtcggtttgataagaaatcggtgcggaaaagcttttgacatagtctactgtcgcttccaaatcctcaggccccgtcaccggattcttgccgagtttcccgatcggaccgtattttgcccccgctgccgtcgccataaattgattgactgttactgtatatcctttttcgggctgtatgtctgtcccgtccgccattttcatttcaaccgcttgtccggtttccgggttccatgtataggaaaatccgctgatgctgtaatccggaccgtacaccggagaaatttgcgcgttaatgatctcccgcaaatcttttcctttgatttcaagcttcgtcagcacattgccgaacggctgtacattataaaggtctccccatgtgatcggccctttttttaagccgtcccggatgcctcctccattcataagcgcaaaatcggatttcatcttcgctttcataccgtcggcaatcagatttccgagcgccgtgtcgccgtcatttgaatacccgcccgttatatcatgggccgcttccccgaccgcttcgctgataatcggtttcactttctcttcatatttgcttaatatgcctgccgcagccgggtcaggcttgattttactttgatcgatatattggatttccgctgattttttcacgatatccttcgactctttatcaagttcaagatcggcgattccgattgcttttccgtattcaaatgcctgcacgatcagcttgccgttgatttctccgtttacgactttatgattgtgcgcggcgaaaatcacgtcaatctctgagtctgttccgcttgcaagctttgcggattctcccgtgatggctgagccattttgttcagcagacatatgggcgagcacggcgattgctttaattccttttttcttcaggtcagcggcggcgtcattgacggcctttacctcatccgtaaacgtaatatttttaattccctccgggatgaccatgcctgccgccgatctggttacaaccccgataaatgcgaccggaattccggaaacgtatttaatttcatacggcggcagaaaggactcccctgacttcaatttacagttggcgcagacgagcgggaaattttggccgtcataaccgcttgtccccttatcgtccggatgatctcctccattgatgatccgtttaagctcattcgttccttcatcgaattcgtgattgccgacagttccgacatcaaaaccgatgtcttccatcaattctactgtcggttcatcctgaaaaagggctgacacgggagagctgcccccgatcatatcgcccgcatgcacgacaaaggcgtgttctttctcggctttcgcctttttaatgtacgctgcggcgtagtccatccgcccgaaagtgccatccggtttaccgtctccgttaaggtcaagctcatattgctgatcaatttttccgtgcagatcattcatactgatgattctgagcgggacacggccggagtcttctgtctgctgttctttatacgctttatccattccagcttcattcagtgatcctgcttgtccgattgcttccgcatctttcacgctgaacatcataaaacaaaccgtcagcaaacagcacgtaagacgcatacccctttttttcttcatttatttcccccctgtcttctaagaaatacgttagcttattttcttaaaaatcacatcacttttttgtaaagattgtcttcactggcgcaaaatagtaaataatccccacgtaacgaaacaggtcttgatgtataacggatcggcttttttcacatcttaatgatgatttgacatgaaggaggaaaacaaccagtggaacagcagcagaatcagcagcagccagtaaatcaggggatcccgggttcaccgcaagtgaatcacggaggacatgagcttttcgatatgcatgaagtgctggccggaacagtcggcgtattagatcaatttatgatgctcagacagtttatacaggatcagcagctggccgacatccttgaccgccagtatcaattcattctcggactctataatctgacggcagaatgctttaagaccggccaaaagccttctcaggaaacgtcgacatatatgatgaaggaacagaaccaggccgtctacggtataaaaccgactcagccgaaaaaaccgaatcaatcattaaatgatgtcaaagatctcgggatcagcggccatatgctcggcctgattaaagctcaagcttctctcttgacgatgagctcgcttgaaatgaccaatcccgtcactagaagagtgctctccgcccaaattcagcaatatgtcgaaatggcgtatgaaatcttcttataccaaaacaaacacggttattatcaggttcctcagctcaatgcacaagatatgcagaccatgctgaattcatttgcaccggcccagggacagccgcaaatgcctccgattaaaggacaaatgggacagcagcagcaaaacctccattgattaaaaaacggcgttggaaacctgactctccaacgccgttttctttttttcatatgcttttatgaaatcatgttcaaattgtttcaggctttctttcgtagccgcttcaaagcctttttcaaaatcctgtgtttcggcggttttgttgataatggttaagataatgccttctccgaatgtttcggttaaatcctttatcatatagaagctttgcaaatagacatccgtttcatattccatacgcgatttctgccattttcggtcggtcgttaattgatcaaacggcacgacggaaaatgcaatcggatcaatgactacatcataatgcgcaacccactcgctcagcccctcatgaaaccaaagcggaaatacagacgtatccgtccccaattgccgcgttttttgatgaaacgcgtagtgtgtatattcatgtataatcaattgcttatacatgaaaacggccagctcatcttttttcaaaagctgttttttctcttcaggcaaaagccccatcatctgctcctgttctgaataaaaaccgactacatttttcaatcctgaatattgctccatttcagcttcatccgaaaagaaaatgagttcaagcggcgctgcacctttatagccgacaatgatttgattgatacgctttgcgtggtccagcgtaagcttggtcagatccaagagaggcttttcatccgccgtatagtaaatcgctgtatgtttgtaaatttctttattcatgtgttcagtcacttgttccttcgtcggaacagagcggctgttttggcctgacaggacgtacatcatacttactgaaacggctgaactgacagccaatatgacaaggactccgcacaggatcagagtgaatgccgcccgtttccccatgccgtcacgcaaacaagctcccctccccgatcctttcattttcatctcattctttactttatgctcaggagcgctgggtcgtgacggcagataaaataaaaaagccgcagcaaatgcggcttttccattcatttatttattggggtttgggaatacacgctgaaccatttggccgaattcatcaaacagaccggatacaggatgtccgttttggattcgttttccgtagccttgcatgcgttcaacgaagtccgggttcgctgatacatatacagtccggacatgtttatcggctgatttcaccttatcggtaatcttattttttaaatggttggcgatggcgcctttttgcccgtttgtcaaaacaacggcaacatatgcgctgtttccggcaacgatcacagtcgcatttttaacctcttttaaatcagtcaccttgtcggcggctttatcagccactctcaggttacgattgtcattgtgatcggtgttttggttatgacggttcactgtattcatatttgtcgcaccgtcgttaggcgtgttgcggtaatttacattctgggtgcggttgtcatttcgttttccttctccttggttccccatactgcaccctgcggtaatcagcatcggcagaagaagggcagagataactgcttgtttttttatcatgtgaattcctcctttctcactttacgtataggtttttctattcggcgggatttatgcacgccgtttgcattctgagcggtttggataaatatcagaaggaaagggaaaggtaagcgtaatcaattgaatgaggagggatttaacttgttcagaaaaaaaagcggcatcagcccgacagcgctgctgatcggatcatcgattctgattgcagctttatcacccgaaatccgccggaaaatctccggaatggtttcaggcagaatgcagcataaagatggcacacactccatgcagcctgctgacctgattcaacaggctttcggcggggaatccggcggacagcagcacacagacaaagcccggcattcacaaaccggctccacacagcctgccgagctgatcaaacaggctttcggcggggaatccggcggacagcagcacacggacaaagcccggcattcacaaaccggctcattacagcctgccgagctgatcaaacaggctttcggcggggaatccagcggacagcagcatgagcagacttcccgcaatcactccggctcatcccatacggacggacaggcagaccgcagccgcagtaaagaaacttcgccgaagcctcactataccgagccgattcacttcgaagaaagcgcggtgaatgttttaaatgacagcaccgtgatgaatatgctggaagaaattgaacccggaaatcattagaaacgaaaaaatccttcattcgttcaacgatgaaggatttttcgttttagtgctatctgcttttttattaagcttcttcagtttcaatgacgattgtggaatcattgtacaccgcggtatcggtttccttcgtcattttacttgttaacagccctgcggtcatactgccgctgacatttaaggcggtgcgccccatgtcaattaacggctcaattgaaatgagcagtccggcaagcgccacaggcatgttcaaagcggataggacgagcagagccgcaaatgtcgcgccgcctcccacgcctgctacaccgaatgaactgattgccacgatggcgatgacggaaatgataaatcccggttcaaacgggttttgccccactgtcggcgcaatcatcatcgcgagcatcgccggataaataccggcacagccgttttgaccgattgataagccgaatgaaccggcgaagttcgcaatgccttccggtacgcccatgcttttttgtgttttaatattgagcggcaaagcccctgcgcttgaacgggacgtaaacgcaaacaccataaccggaaatgcttttttcacgtatgtgatcggatttaaaccgctgaacgtgatcagcagcaagtgaatgataaacatggcgataagcgcggcgtatgaagcgatcacaaacatccccagtttcgcaatgctgtcgatgtcgcttgtcgcgatcgttttggtcataatcgccaataccccgtaaggcgtcagtcttaaaattaatgtcacgacgcgcataataatcgcgtaaaccgcatcgacaattccgctgaatgtcgctgcgtgctccggctgcttccgtttcacgcccagaaaagcgatgccgaggaaagcggcgaaaataacgactccgatggtggaagtcggtctggctcccgtgaaatcaagaaacggattccccggcagaagctcaacgatttgctgaggcagcgttttggccgtcatatcctcagatttttgctgcagctcctgaccccttgataactcagtgctcccctggtcgatatgaacggctttcagatcaaaggaaagcgccgaaacaattccgactgccgcggcaattgctgtcgtagcaatcaaaattccgatgatcagtccgctgattttcccgatgttatgggtcagtttcagcttcgtaaatgcgccgagaatagaaataaagactagcggcatgacgatcatctgaagcaacttgacataaccgccgccggcgatattaaaccaatcggccgtttgtgtcacgacatgtgaggccggcccgtaaatcaattgcagcgcaaaaccgaatacaatgcctaatccgagcgcggtaaagacacgtttagaaaaggaaacgtgttttttttgcatcacaaacagacctgctataaacaaaaacaaaataaaaacatgtaagattacaaataaattctccaaaacaggtaaacactcccttgctcattatccttaaacactatattacatcaattccgatcggtcaagtaagaattgacaatatatgtatttttaatgatttttctcttttctttccatcctttctttagtaacttatataagggtgattgttatgctgaaggaactgtttcttaatttgacgattttaatcacatttaattatctcttcaccgttctttttaaagagtcgctttcacataaagaagaccgtccgatgtttcaattactgaaggggacggtctgcgggcttttaggggtttttctgattgctttcggcttttcttactccgattccatcattgatctcagaaatatccccattatcatcgccgctctttacggaggctgggtgtctacagcagctgcctttatcattatcgtggcaggccgtatcctgatcaatttcaatgccagcgccatttattctatcgcagcagtcggcatgattgcgatactttctgtggccgtattcagaggaaaaaagccgaatcacaaaaatgcgttcgttatgctgctcttttcaaatgttattatcaccctgacgctgctgttacttatgcctgaacagcctgccggggccctcgtttatttttggctcatttctaccttgggcggaatgctgtcgctgtatatcattaaacacgaagccgatgcccgccttttgttcaagcaatacaagtttcaagcgaattatgattttctgacggggatttttaataagagaaaattcgaggaagtctcgcgcgttctgtacgatcgggcgtctcaatccccctcgtctcagctcgctcttatttatttggatattgatcactttaagcagatcaatgaccaatacggccattatgaaggggaccaagtgctgaaggaactgggggcgcgcctgaggttcttactcagcagttctgatccgtcagcccgtatcggcggggaagaatttgccgtgcttatgcccaattgcacgtatacaaaagggcttcacctcgcagaagaaatcaggcacacgattgacgcgaacccgattctgctgacgagcggagatacaattcccgtgaccgtttccctcggcatcgcgcattatccgacaaatacatcggatcctcagacattgcccctgatcgcggaccggatgctgtacaaagcgaaaacatcagggcgcaatcaagtgtgcagcactgaaaaaaaagaatgatcgcccgaagaggaaatcattctttcttttcagtgagaaaaccgcccctcaggaaaacaggaatcaggctgccctcatattctttttcaataaacgccgcggtatcatctgattgatacaaagacaggagtttttgcatccgttcatcatctttattctcagctctgacggcgatcagatgaatatatgcttccttcatttgcgccgatcggatcagcgcgtccttctccgcatgaaatcctgctcttttcgcctcgctttgactgagaactgctgcgtcagcatgttccgccgcctgataggcgttcttttttgtttccgtttttaaggtcagatgcttcgggttgtccttgatcatatcagttgaacccgtaccggtgaatccctttttcaatgtcatcagtccggcctcctgcatgagaaaaagcgccctgccgaaggccgccgcttcaccaggcacggcaatgaccgctccgtccggtatatccttcagccgtttatgttgctttgaatacacccccagagatgccgcatatgtcgttcctaaaggagccagcttctttttcacatgaggcggcaaagattgaaaataagaaacggattgaaacgcattggcgtcgagatccccgccggcaagcgccaaatcggcctcggcataatccgaaaacgttaccaaagaaagctgcaatccttcctcaccggcttttttcgcgacaaactcccagatcgattgatcagattcattgattccgatagtaattgtccggttcccgtcaggataatgacatgaagtaagtgacatgatcaaaatgaaaagaaacagactgtttataagccgcaggttcaagttgacctactccctatctatttttatgtacagaggctgcaccatggtattcgggctcatgattacatacaataccgattaaaaaaagggttgtcaattgcttccttaagagaccgtaaagcggtttttatcagctgaaaatgggctgttctagtctcaaatcagatttccgtatcagagcgttctcctcttaaaacatgttatttcgaaaaaagttacatttagcagttgttttttcttcgaattactggtagagtaaaggtaattatttttgttcgaactatctttaagaagaaagttttgtaagagttttcgtcttggaagtttgttttagagcaagaatagtgaatttaagcgttatgtcgctttaggaggaaatttcatgttagaaggtaaagtaaaatggttcaactctgaaaaaggattcggattcatcgaagtagaaggtcaagacgatgtattcgttcacttctctgctattcaaggcgaaggcttcaaaactttagaagaaggccaatctgtttctttcgaaatcgttgaaggaaaccgcggaccacaagctgctaacgtaacaaaagcataaattgtttaaaaaccctgccggtgtacgccggcagggtttttttcatctaaaacgaaaagctgttttgcaaaggcaaaacagcttttttatatcaggtggcaatatcgcgttttaagaagacgccgaatgcgagcgccagaaaaataacgaagtaaatcacaagcatcacaaccgaaaatgtcatcgtcatcccctctactaaaggagtcccgttcatatattgcgacaaatccgtgttggcgaataaaatatatttggtccattcaaatttcgtggcaagaaatacagtcgccgtgtttcccataaccaatagaaaaatagaaaatccgaccgctaatgagctgttccggaataccgcagacagcataaacgccatcgtcgcaagcataaaagcggagacagattcatagacatatgttttagcgaggaaggcgatgatattttgctcaaaaacatggccgtctttgtatacgagatgaacatcagccgcagtatctccgcctgtaccgaaaaagaccaatcccaacagagcggagccggcaaataaaatcacaagcatcagcagtccgaacagcagcaccgtcatatatttagatagcaaaatctgaaaacggctgagcggacgaatggcaagcagcttgatcgtgccccagttgaactcattcgccacaatgcctgcggcaatgataatcgtaaacagcccggtcaaaacagtcatcatcgaagaatcagctacgtatgaccacactgtgtaccctgtatcctcagggatgttatgatccatacggtattgatttatcgcgacattctgtttcaggttatcaatgagagtctggtttccggtttccttcatctgctgtttcatttctttgttttcggcctggagctcctgtttccaattcggattggcttcgctcgaggtgaaatggtttgacagaagcgcaaaaccgatcatcgaaacgcctaaaattacaatcatagcccacgtgccgacgcggctgaaaatttttatccattcattatagatcagcttaaacatattgaacctcctctttcgtcccgccggtaatctccaagaaacggtcttccaaagattttgtcatgattttcacttcatataagcggatgttttcacggacgagcagtgaaatcacatcaggtacttcctgttttgacagcctgatctcaatgccgtttgtcttcttcacacagtcaaactgactcagaacggcaagagcctcttctctttgttcaatatggaagaagtatgtatctttatcctcttttccttcatcccttactttttgaatatcgacaagctcccctttttgcagaatgccgattcggtcgcacattaactccatttctgacagcagatggcttgagacgatgacagccattcctttttcacgtgtcagctttttcagatggtccctgatttccctgatgcccgcgggatcaaggccgtttgtcggttcatccagaatcagcaccttaggattatgcagcaggctttgggcgaggccgagacgctgtctcattccgagagagtaggtttttactttgtcatgtattctgtcctgcaacccgacgagctcgatgacctcatctattttttctttcgtaacgccttttaccatccttgcgtactgctgtaaatttttataaccgctcaggaatttgtacagctccgggttttccacgatggctccgacgtgcctgaccgcttttgcatagtttttcgtaatggattccccgcagattacgatgtctccctgagacagtttcattaatccgaccatcattctgatcgtagtggttttccccgctccgttcggccctagaaacccaaacacttcgcccgcccggacggagaagctcagatcatgaataatcgttcgtccttttatcgttttctttacctgttgcagttctaataccgtttccaattagaatcccccttctatttcgtgcgcctgcatgacgcttctgtaccattgcagcacggacattccttcctgttcccgaatttcttcgacctcgcgccgttcagcgattttcccttttatgaaaaccatcacttcgtctaacagcgtctcaatctcgccgatctcatgcgtggcgatgacgacgatctggctgtcaaaatcaatataagatacgagactgttgacaatcgatcctctgaccgccggatcaagacctgaaaacggctcatccagcagaatgacggatgcttttctcgacagggccaaaacgattttcagcctgccccggctgcctttggacagctcttttatcttctgcttcgctgaaagattcatttccattaataggttatgtgctttttccagctgaaaatccgggaattgcgaatgataaaatgtgagcatatcaccgacggtcgtccgggcgaaaaacatatcatgttcggttaaataagccgtacgaaacagcatgttcctgcttactgcgcagtctccgatccggacggcgcccgaggtcgggaacgcaagcccggcaagcattttaagcgttgttgatttaccgcttccgttcggccctaaaattccatagattttacccggagacaatgaaaatgatacatcgctgaccgcgagcctgcggccgtatttttttgttacgcgttcaaaatcaagattcatcgtttgcttcctccgcatattgtttgatcccgtcgatcatttcctcaggagataaccccagctccgccatttcctgaataaagcgtttgaaaacgtctttagtcagcctgtctttcagctccgctttcagatcggacctttccgctataaaggttccctgtcctcttctcgtctccacgatccccagcctttccatttcactgtacgttctttgtatcgtattcggattcactttcatctgtacggccatctcccttacggacggcagtttgtcccccggtgaaagctcacttcggatcagccggtaatatacacgatcggcaatctgcagataaatcggcttggatgactgaaattcattctccatcattacacctcaacctttcgattcagcagcatagaggccagcgcgagacagagcgccgcaagcacgatcactgccaggaagctgaaaagcgagatgtggacggccttcagctccaccgtccagccggtcaattttgtatagtgaaaatcaaaatccgcatacacttttaccggccataaatcatgttgagatgaagtgaatggcgtaatgattttatcgtcaatataggtccagacaaacgcaagcacgatgcagatcacccaccggaggacgggaacatgttttaatgagtgaaaaacagtccaaaatacggccacgatcacagataaatacgctgaactgatcagcaggtaagcattcagtccggttaatgtgccggccaggggaatggtgtgttccagcgctccttttgcagaaagcatccggtacatccaaatgccgtaaccggtcagcgccagctgcccgatcaactgatacagcagtgaggccgtcagcttggaagccagcagataaaatcctccattcggattgtaaagccacagctgattttttccttctttatgaaggtgatagtacataaaaagcggcgctacaagaaattgaaaaaaccccattgccgtaaaaaagccgaaaatgacgagcggttctttctgacgggcagcgatgacgtgggctgcaaacgcccagcaaatcatgccgcaaagccacaccgcgagccaaatccatgaaactttcgcatcttttttcagcaaacctaaaaacgatgtcattctttctctctccattcggatcaagtgtatgagtaacatagtacactagatcatcacgtattacaatatcttcaataaaaaaaagacaaatccgctcttacgcagatttgccttttcaattacttctttttgttttttaaggagagcagcgcatcacgatagctgctatcctgcattttgccgccgctatcaggatcgtttggttcctgatccgtctcagaagtcttaaacttctgaagcgcctgacggtacacatcatcgcccattgtattctttttctcacggggagattcagattttacaacgacgggagcatgctcggctgagcgctcctcggccggatcatgcttttccggctgttcggctgtagtgccgatcgcttctctcttttcttctttgacatcctgtcctgcagaagtgctgcggacattgaatgtgataagaagtgcaatcacaatgacagcagcaataaccgctataataatggccatataaccctctccttactgtcgtccggcagttagattacctgtgacttggctgacacgtctgccaagcgcacggcctaattgaaggccttcttccgtcatcagcacatcgctgtcaaccgggcatgtgacgcccgcaccgtagtaagagccgtacagcgcgttttcaggaacgttgccgggaagtccgacaacaatcatgccttggtgaaacataggagtgatcagattgtgcattgtcatttctaatccgccatgtgttgtcgccgtcgtacagaatacggcgccgactttatcaatcagctcgccttcagcccacagatagccgagtctgtcgatccacgcttttaagcctgaactgatggtgccaaagtgtcccgggcatccccagataatggcatccatgtctttcagcttgcggatgtctgcttgatcgacatggtcgatcaggacttcagcctcagcgttttctcgtgctccttcggcaatggcttcagcaaggtgttttgtatgttcgccttcactatcgtacactacgtaaattttcattcaggaaacctcccattcagatgattaagattccttcacttctttaggggccggaagcaatgacagctcctcttttttcttcgcccgctgtttgtctttccgtacgtcacgcaagaacaggctcaggactacgccgataaccgcaaagatcgtcgcccacataaacgcgtcattaatccccataacgttggaattaagtgaagctgttttgtagagataagaataaacggtttgtttcgccgcatcaagcgacatgttcatgttgaccattaaattcgaaaccgcgctttggaacgactgcatgaagcttggatcagccgtgctcgttttatccgcaatctgcgaatagtgcattgtcgtacggttcgtataaatcgttgtgatcaaacttgttccgattgaaccgctgatctggcggagcgtgttgctcatcgccgtgccgtggctgttcaaccgtgccggaagctggttcattccggctgtcataacaggcatcattaacagtgacataccgaatgcgcggatggcatagacaagcataatgtgcgtgtaaggtgtgtcaattgtcaattttgtgtactggaatgtcgttgcgaccgtgatgaccagcccgataatcgcaagcggtcttggaccgattttgtcaaacagaataccggaaatcggcgacatgatcagcatgacaatcgcgcccggcaatagcaagaggcccgattgcagcgccgtaaagccgactaagttctgcaggtaaatcggaagcaggaacattcctgtgtaaagcgcaacggtaataatgatgttaatcacactggaaagtgagaaaatatcatatttaaatacccggaagtcgagcatcggtttttcagagcgcaattgctgaatgacaaacgcggcaatcgcgatgacaccgacaatgacggtagacagcacgatcggatctccccagccgtcgctgcccgcttcactgactccgtaaagcaatgaggcaaatccgacaatggatagaatcgcacccaagctgtcgagtttgattttttgcggttccaccaagttcttaaagaggaagaacgctatgataataacgattgccccgatcggaacaaggccgtagaacataatgcgccatgtgtaatgctcgatgatccagccggaaagagtcggtccgaccgccggagcaaacatcatcgcaagaccgaaaatccccattcctttccccctgctttcaggcgggaagataagcagaatggttgtcatgaccagcggctgcaggataccgccgccgaccgcctgaattaaccggccgatcagcattgttgagaagttaggcgcgattccgcagactaacgttcccgctgtaaaacagaacatggctacgagaaagaggcttctctgtccgaaccgggtaattaagaacgcagataacggaatcaaaacaccgttgaccagcatgtatccggtcgtaagccactgaatcgtcgtcgcactcacaccgaactcggtcattaagtgcggcatcgccacgttaagaagcgtttggttcaagatcgccaggaataacccggccataagcacaataagcaatgttttaggactttttacttgattatctgatttagccacctaagacaacctcccttcatggtttgatgactgatctgtattattcagagatttttacagatgcgttcataccaggaagcaccttgtcagatgggttgctgagtgaaattttaacaggaactttttgcgttacttttgtgtagttgccgcttgagtttgaagaaggcagcatatcaaatgttgaatttgtcgcataaccgatttcttctactgttccgtcaaatgttgtattagggtcgccgtcaacaattacgtctactttgtttcctacttcaatgtctctaatgtctgtttctttaatgtttgcagtgatgtaaaggtgtttcatgtcaatttcctgggcaattgtcgtaccggcttgcaccatttggccgtttttcacttcgtttttcacgattgttccatccatgatggcttttacgtcagcattttgctgtcctttgatttttgcaacaacgtcgtttttgcttacttctttcccctcatcaaggttccagtcagttactttacccgcagcaggagctgtgatagcagccatgtcgccggcaacttttgcttcatcggtttttacatagtgtgtgctttgataatagtagtaagcacctccgcctataattgcaagaacaacaatcaaaccgataatgttggtcagaattaaacgtcctctgttcattttgttttctcctttcgtttcttcctctatcattttgtggaatgatgataaaaatatgtggggatttttttattttccgtttttcactgcacagccgtttgcaagcttcgttaaactttccgcaagcttgcgcaggtactgcagttcagcggtattgagctgccggtataagaccgccgctttttcggcatattgaacagcagctttctttagaagttcttccccctcttcggttaactgaatcataacaacacgccggtcgtcgtgatagtcgctccgaaccattaggcggcgcttatacagaatatcggtcattctcgtgacagacgccggtttcagatcaagcgacaaagccagccttgaaagctgcgtgcttttgctcttatgtattttgaacatcagcagatactgcagcactgtaatatcaaaaggttcaagaactgtctccagaatcattttctgctttttgtaaatcgatctggaagtatcaaacagttgttcaaaactgagcaaagcgagctctgattcaatcaccgtattttcacctcattcccttaataatagttcacaagataaaatattaataaatgaaagaaggtttgtaaagagaaaagtttcattttttaaggattttttttatgccgttttttctctttatttttaatttaaaaaagccgggtgaagaaccgcggccgcacgattcttcactcggctttatatttcatacgatgctttgcttacaccggcttcctcatttttaaaaaagcttttcagcgcttgaaatacgtctgatttctgtttcaggatgtagtatttaaatttatcatctttgacatttttataggcggacatgagggtggaatgcctgttatattgattgacctcaccgtaacagaacagattcgattttttcatgatgtcattgacgagctttacgcaccgggcgttatccgaagtcaggttatctccgtctgaaaaatgaaacggatagatgttgtagcgggcggggtcatatttttcatcaattaattcaagagacttccggtaaacggaggaacagatggtgcccccgctctcgcctttcgagaaaaaatcttcttcggacacgaccttcgcttccgtatggtgggcgataaattcgatatcaaccgtttcatactttgtccgtaaaaatcgtgtcatccaaaaaaagaagctcctcgccatatacttttcccatacgcccatcgaaccgcttgtatccatcatcgctaaaacgacagctttcgattccggcttcgtcacatcattccatgttttgtatttcagatcttccggataaatagggtaaaacgacggcttgcctgtcatggcgtttcgtttataggccgacagcatcgtccttttcttatcaatattccctgtcagcccggttttccggatatcattgaactcgatatcggtatggacgatattgtccctttccttttgctgcagattcggcagttctaattcctgaaacagcgcttcttccagatccatcaatgaaacttccgcttcataataatcctcgcctgcctgatcgcctgctccctggccttttccagcaccctgctttttatctgcgccgtctcttgcgacgacatcgccgacttcgctgtcgccgtcgccttggccgacatgtttatttttatcatagttataacggattttatattcatcaagcgaacgaatcgggattttcacgacatcttttccgttggacataataatgctttcctcagtaacaaggtccggaaggttgttttttatcgcttcctgtactttcttttggtggcgctgctggtcgtcaaagcctttgcgatggagggaccagtcttcctctgaaatcaaaaaatttccgctgtcattacgggacatgaattcccctccttaaccgttatggtcgttttacatgtgtattccggcttggtcctgtttatgaaacaagtccggcgaaaagatttatttttatcttatgccggccggactctccaattgacaaacaattgcgaaaaacagacaaaagaacccgtccttttacagacgggcctctcaatgaaatcaaacatcagcggtttaacaagcttccgacatatttcagcagttcattagcgcttgtcgaattatagccgtgttcatctattaaccttgccactacctcattgacctttttaagctgctgttcatccggcgttttggtggaggtcgtaattttcaccacatcttttaagtctgcgaacagctttttctgaatcgcttcgcggagtctttcgtgcgaattatagtcaaagcgttttccttttcttgcataggcggatatgcggattaaaatttcttcgcggaacgcttttttcgcgttttctgaaatgccgatctgctcttcaatggatctcatcagtttttcgtcaggattcatttcttcacccgtcagcggatcgcggagcttatttttattgcagtacgcttccacattatctaaataattgtccatgagagttttcgcggattcttcatatgaatagacgaacgccttctgcacttcttttttagcgatgtcatcgtactctttcctggcggcggaaataaaattcatataccgctctttgtcctcggcggaaatggacggatgctggtcaagtccttcttttaaggaacgcagcacatcaagtgaattgatcgattccatattttttctgataattgttgaggaaatgcggttgatgacatagcgcgggtcaattccgctcattccttcatcatggaattccttcttcatatcctccagatcaacggaattgtaaccttcaacgctttctccgtcatagagcctcatttttttgacgagatcaatatcagagcggttcggttccttcagcctggtcaaaatagaaaacatcgcggccacttttaatgtatggggggcgatgtgtacgtcagaaacatcactttcagaaatcattttttcataaatccgttcttcctctgacacctttaaattataaggaacaggcatcacgatgatcctggagtgaagggcttcatttttcttattggcaataaacgagcggtactccgtttcgttcgtatgcgcaacaaccaattcgtcggcagagatgagcgcaaaccgtccggctttgaaattgccttcctgcgtgagtgacagaaggtgccacagaaatttttcatcgcatttcagcatttcctgaaactccatcattccgcggttcgctttatttaattcaccgtcaaaccgataagcgcgcggatctgattctgagccgtattcggcaattgttgaaaaatcaatactccccgtcaagtcggcgatatcctgtgatttcgggtcagacgggctgaaggttccgattccggtacgtttatcctccgagaagaatatacgttcaacctttacatcctcaattctgccgccgtattcttcttcaagccgcatgacattaagcggagaaaggctgccctcaattctgatgccgtattctctgtagaagtcgtcgcgcagatgatggggaatgagatggagaggatcttcatgcatcgggcagcctttaatggcgtaaacagcgccgttgtctgtcaatgagtaggcttcaagcccttttttcagcatggtgacaagagttgactttccgccgctgacgggtcccatcaatagtaaaatccgttttcttacatcgagccgcttggcagccgggtgaaagtattcctccacgagccgttccagagattcctcaaggccgaacagctcccgcgagaaaaagctgtatgtctttttaccgtcatcctcctcgattccgctgtcttttatcatattaaaaacgcgagaatgagcagactgcgcgaccaatggattttcttttatgatctccaaataatcagcgaacgtcccttcccatttgagacgctgctcttcctctctgtacttttcaattttctttaatatatccataagaacctcctctatcatggttaatgcactagaaataaggtactttgttacaatctatgcggtgacgtgataatacatgcttttcgtttcttaaaaataaagacgttataaggccgtcattgacaagggtccggtgcaccgttcataatgaaagaaatacagtttcatccagactcggacatcaaatggaaaagcaaagaggaggagaaatgatgaaaacgatcattttacttggtgtcattctcacttttttagtatccatttttacggcgggttacgacagcaaacctgaaaacaaataacggcaaaagggtgctctttatgaagagcaccctttcctatacaacataacaatgtttcatatttgaatatgttcttggacagttgatttttcatgagatttgcagcttgtttgatactcgattttttcgattttgcagcccgggccgatttccacatgtttccctctgacgatgtccgcttccgtgtattcgagataaattgcgtctccttcgatcaattcagcagaaagcgtgccggctttccgtttaagaaaaccgggtttccgtctgacggtgatcgatgtgccgccgatttctttcacgcggcttcggtcataacgcaaatggatgtttacgtcccccgcgtttaacaatcccgccacattgatacatcctgttacatgaagcagctccgtctcgcaatcgccgccgacggtgagactgccttttatatgacactgctctcccgcggccccgccgccaatttcagcaagtcctttcagcctcatcgtggcgaaacgcatggagccgccgactttcaatgtgcccatcacgtttgctgaacgtactgataaatctcctgcaacttcatgctctccgaaaattttcagcctgttgatctcggcatctccgagaaaaagtcccgtaccgaatacccggcagcgttcgctttgaagtccttcgccgacagttccttcccctttaatgcttacattttggtaggagccgccggaggcgtgtccggctccgtacatttttaaatgactcaatttttttgtcgtttccatcgcagttcctcctatcgtttcacgactttgttaaccaaagcggaaggatcacatgtaaaatcgccgctgtattccacagtcccaatggtgcagcctgcgtcgatccgcacatgatttccgcggactgtcttcgcgttcgtgtccgccaattcaatgatgtcaccttcaatcagctccgctgtcagcaccggggccggcatcagcttaaaacgcgtaagcacgctctttctgctcatcactttcaaatggcggcagccgatctctttcacatggctctctcccgccgtcagcttaatactgacttcatcggcattcagcaggccgccgatcttgcatttgccttccgaacggaacgtctctgtctcgcaatcgccttcaatcccggctttcccggatatgaaaatatcatcagctttcacaccgccgccgaaagatgaaaatcccgcgacgttcagccgctccgttttgacatcacctttaatgacacccgttccgttgatacggatggattcagcttcggcactgccggaaattttccccgaaccgctgatcgtcagcgtttgcgtcttgacatgtccgtctgtttttccgctgccgttaaacaaaaggctcgtgcactccacatcacccgataccgtgccgctcccgttgatctccactgtatgaaaacgacctccttttgaacttcctgaaccgttaatgattaatttatctgttacttccattgatggtcctcctgcatccatttcgtttttaattcttccgatgccgcagcaagcgccacccgttcaaccactttgacagtcggttcaaataaaatatgttccgcgtctgcgatgaagcacgtcgttacgccaagctttcggagcatgacaagctccgtatttactttcagttcggaagcctcatacgttttcagcacccctgccgccaattttccttcctcaaggctgatattgcccgatcgcaaaagtccttcaagcacatataaagacagcagcgcgcgggacgtgaatgtcacgccgtcttcgccataaacttgcagcgcggcttttgaaatcagtcccttttgaagcagctccgcagacgttatattgacatcagtcatttgcggagacagcatttctctcatttcatccaaagacagattttctttcattttctgtatttttgagatgcgttttaatatttccgctctcggaaaaaatgtttcctggcctgtaaatgttgattttcggataaaccattcttcaggaattaaatttttccgtttccagcggtacagctgcccgtatgagattgatgtttcttccagcaattcttttttagaaatcagttgttcctccatgaatccagctccttcgatgaaagtattgtaacataacactgttacgttgttaagcccataaatataaaaacgccgtgaaccgctgctgtccgtcttttttattcaataaaaaaacgcccggatgcgggcgtttttttcacgtcaaatctctgtaattttgctggcgcagcgcttcatatacaagaatcgcggccgtgttggacaggtttaatgatctcacatgctcggtcatcggcagacgcaggcagcggtccatattgttttcgatcaattctttcggaagtccgctcgtttctctgccgaatacgaagaaaaagtcttcctccgtatttgagtaatcaaatgatgtgtgcggcttttggccgaattttgtaatgaagaaaaactttccgttctcatatgcctcaaataactcttccaatgaatcatgatatacgacgttgacgaactcccaataatcgagtccggcgcgcttcagcattttatcatcggtcgagaatccgagcgggcggatcaaatgaagcgttgtgtctgttgccgcacaagtacgtgcgatatttcccgtattggccgggatttcgggttgatataaaacgacatgtaatgccacgatgttcacctctgttttttattccgcccaccattatatcattaattacacttttgtcgtatcatccgtaatatgaaaaaacgcatatctgatggaaggagtatacgccgttgaatcctcatatgaccaatatctcattctgctgtcatacgtttgggcattgacaagcggcatattgcttttatctttcgcgaccacgatcgccgtatgattaaaacggccgtccccttcaaaatcatagcaaatgatatctccgggcatcagttcttcggctcttgatacttgcaccgcgcgaagccctgccttggattgggccagatacatcttcatcgaatgcgcgaccgtccagctgtagctccacgagcttgccttcatccaccagcctgagcctctgttcggatgcccccgcatcggtgcttttccggcatgtaaacattgggaaataaaattggtgcagttgtcgctgaaattgttataagcgggatttcgtttattccaaaacttctccgcgtactgcacggcagccagacggtcgtatagaaacgcccgcccgaaatcttcccgttcactccgctcatattcaattacgctgtttccgtcagaaaatcccgccggttttttctttacttcccgatctttaatcaaaagctgatcatagagaaatgcagtccgctcctcaatctgctcttctaagtaaaggtgtccgtcatgctccttgcacaaatattcgaaatgaatcgtgtacatgacgcataacgtgccgtcgtcctcaaggctgcttttgacaatgacggcttttgccttcgctttcacaatgtcaactttccgtttttcaaacagctctttttttctcgtcaggacctcaagatcgccgggctgcccattgtgcctcatctcggttccgttgattaaataatgaagccgggcctccgctaaatcttcaataatatgcttcaagcgctccacccaccatactgttttataaagaaaaacacttgaactcacgccaagtgctttttctctatacatatgtcaggaccggccggttttagtcttatcagaaaccgataacagctccagtcccttttcaatttcccgtatggcgtccacatcctgctccttttgaagcgctttttctaattcccccgcataatcaggatcaccgattttcccgatggcccaggcggccgtccccctgataacagggcgcggatcttggtgcatcaaggccgttaattccggaagagacgaggcatctttaaaatgagccaaagctaaaatcgcattccgctgtatcggcttcttgccgcgccatgatcccgatacatgtccgaatttttctttgaattcgcggttgcttatggtcaaaagcggctttaacagcggctttgcgatttccggatcaggctccatctgcggatgaaggtgaaaatctttccccttattaattggacagaccgtctggcacgtgtcacagccatacagacggtttccgattttcgtgcggaactcatccggcagaaatccctttgtctgggtcaggaacgaaatacagcgctgggcgttaagctgtccgggattgacgagcgcgccggtcggacacgcgtctaaacattttgtgcacgtaccgcacatatcttcaatcggcacatccggttcaaagggcagattggtgatcatttcagccagatagacgtaagagccgtattcaggcgtggtgatcatgcagtttttggcgctgaagccgattcccgcccgttcagccacggccctgtcggacaattcccctgtatccaccattgactttgtgcggatatcctcatgtttgctttggagaaaattctccagcagatcaagcttttccctcagcacgtcatgataatccttcccccaggaagctctgcaaaaaatgccgcgccgcccgtccctcgtgctcctcggcgcatctttcattttggaaggatacgcaagggcgatggcgacgattgatttggctttcgggagaagcaaagacggtgtaacccgtttttcaatatccggctcttcaaacccggataaatagccgagtgattcctgaagaatcagccggtcccgcagactgtcgaacgtatcagccgtcgtaaacccgattttgtcgactccgatgcttttggcgtattcgattaattcctctttcagtttatgaatattcattttttgcacagcctcctttctttgtgatcaggctcccgcacaggtataatagagttttatcatcccgaaatggagtgaacacacttgaacatcaatttagatccacttattgctgaacgggtgccggggatcaaagcggcagccgtcttatatgaacagatcgaagtcgggcctgctccgcaaatgctgaaaggccgcctccgtttatttcaagaatctctttactttgattatgctgacgggggtatagaagagcagccttttgtaaaagagtgggcgcgtataatggaacagctcagccccgccttttcaggacaaaaaacgccgatggagcttatgctcggcgatatttcccgggaacgattcattgaaagtgtgaattcagcccatgataccatactttttttctccttgaaatattcattgcctatcatggcgtatgatgccgcagaaatagatcaaccaatttcaattacgatcggagaaaaagaaagcgtactgtctttctccggcccggacggcgttttcggcgacttcaccggacatatcaatacacgccctgtcacgcccggcacaaagaaaatgctgcagctgatctttttcccgccttcatttcatgccgacgcggcggatgagctgctatcatccttaacaaaaatgtttgaacaaattcacggaggcacgcataccgtctcttggctttcataaaaagacacgccttcgtgtcttttttcacataaaaaaacgcaatacttcgtttatcagagaaacgaaacactgcgttaataacgtatgtatggagcgggtgatgagaatcgaactcacgacatcagcttggaaggctgaggttttaccactaaactacacccgcatcaaaattattttttgtcagtaccgatttgatgtttctaatattacatgtttatttttttttcgtcaagggaatgttaaaaaatttgtcgaaaaaaattctttttttgtccacatgttaagttgggtttacattttgttaagagtctcatacaatataaaaaagaaaaaacttgaggtacgcctgatgatgaaaaataaagtaaaagagctgagagccagattcggctattctcaggaaacgctcggaaaagaagccggagccaccagacagacgattgcagcgattgaaaaaggagattatgtgccttcacttttattggcgctttacatctgccgggctttctccctgccgatggaggaagtgttctggctggaggaggagaaaaaatgagtttgaaaagaaaagcgtgttttcaccttgcactctacggattggcctgctggacgcttatttcctttatggaagcggcgccgcggatcgctcagtttttccaaacggaggggagcggttcatttgagctgaatatcacgccgtttctgctgtttaccgtttgtactgcattatatatctatactgaaaagaaaaaacggaacggcaaaaagcacaggcttgtgcccgatgaatttgaggaacaggatgaaagagaacggatgatgacggctaaagcttgccgttcctcgtatatcgccgtttacttctcattgccggccgcagccgttctgcttttgttttatccgcttattcagccgcatcttcccttttttccgattcttttgattttcattctgatgatgattcagcatttggcttatgttttcacttttcataagcacggcaaaaactccggttcatgacagatccggagttttttatgttaccagctcgcttttttcaccccgggaatccggcctttatgggccagctccctgaatgcgattctggacagtttaaattttctcatatatccgcggggccgccccgtcaccgtacagcggttatgaagcctgcccggagcagaatcacgcggcagtttgctcagcgcttcccagtctccttttgcctttaattctcttcggatgtccgcatattgttcaacaagcttctgccgcttgagctctttgatcacttttgatttttttgccatttcagcactcctaacaaatcgtaataattacgttttgtatcatatcatccatatgagcatcgtgcaagctaagcgcttaaaaaggcgggtgaatacccgccttcactgccggcatttccccggaaatgaatccgcagaaagcgcccgtcgtcaattatccgccttgcgacatcatcagactgtcgctttatttcctcttgcaaaatggtcgtttcccattgcttcacccagtctgcgctcaagctttttagtccgttcattctgaaacggcagaagcggaaacacgagttcagccagataataagcttcttccagatgcgggtagcctgaaaagataaacgactcaatgccgagtgcctgatactctaaaattcgagcagcgacagtctgcggatcaccgacaagcgccgtgcccgctccgcctctgaccagtccgatgccggcccagagattcgggctgatctcaagcttcgagcggtcaccgttatggagatcggccatccgtttttgtcccgatgaatcagcgcgccgaagcgcagcctgcgctttcgcaatcgtctcttcgtctaagtggctgattaatcgatcagccgcttcccatgcctcttcctcagtctcccggacaatcacgtgaagtctgataccaaaacgcatcgtccttccttccttggcagcctgttttttaacggtttcaatcttttcttttacctgctccggcggctctccccatgttaaatagacatctgtatgtttcgccgcagcttcaattcccgcctgtgatgaaccgccgaaatataatggcggatgcggagactgctttggcggaaacagcagattgctgttttccactttgatatggtccccttcatatgtcaccgtttcgccccgcatgagtccgcgccagacggttaaaaattcttcagtcgccttataacgttcatcgtggctgataaacatgccgtctcccgccagttcataaggatctccgcccgctacgacatttacgagcaaacggccgtctgacagccgatccattgtcgacgccattctcgcggcgacagacggctgcatcagtcccggacggaccgccactaaaaatttcaagtcactcgtttcccccgctaaagcggcagccgtcagccacgggtcttcacatgatctccccgtcggcagcagaacccccgtatacccgagtctgtccgccgcctgtgccacttgcttaaaataaagatgatccgccgttctccctcccgtttgcgtccctaaataccggccgtcaccatgcgtcggaataaaccaaagaatctccatatgaatctctccttttttaataggttacccttcataactgttccgccattttaatagtttccgttcgagcattctgaccaatgcatctgtcagcttgccgacagccgcaaaaatgataatgccggcaaacaccttatttgtctgtgaaaattgtctggcatccataatcatataaccgacgccctcgctcgatcccatcagttccgccaccacaagaccgagccacgcaatgcctagagagagcctgatgcctagcaggatattcggcagagatgccggaagaattaatttcgtcatctgctgataccagttaaattccagcacccgcgcgacgtcaaacagcttcgcgtccacactgcggattccaagaaacgtattaatgtacacgggaaaaaaagcccccaatgcgatcagcagaatttttgatgtctcatcaaatccgaaccacaaaatgaacagaggagtcacggccaagtgcggaaccgttctgagcatttgcagagacggatcaagatatgcttccgtccgctttgagaaaccgaccagcagcccgaaaacaaggccgaggcccgcgccaagcagaaatccggcagccgcccggtataagctgatctctaaatgaccccaaagctcacctgaaagaagaagttcctgaaacgtctgcaagatgacgacaggtgaggggagcaccgtggccgagacgatgcccagacttgcgataacctgccatactgcgatgaccgcagccgggagtacaacccctttcatccattggtatgaatacttccgggatcttgccagagctttcttttctgattggcttattgcgccggcagccgttgatgcttctgctttcattacttgccatcccccgtttcaagcgcttttttaataaatgaattgtcgacaacgtcttttacatgaattttcttatgaatcgcttttgttcgatattgaaaatcagcggtttcctgctgggctttgacaatatcatcattgatcggttcattgagaggctcagtattgttaagcacgtttctgacgactttcggatcaagatgtttgattttcgcatataaggagacagcttcatctttgtgttccttttgccatgtaactgctttattgaacactttcagaaaacggaccacctcatccgggtgttctttggaaaattccgttctgactaacgtgaaaccgggagaatataaatctgtgctttctccgttcgccaatatttccgccccgtgctgcagcgtttcaattgacaaatacggctcccaaatggaccatgcgtcaactgatttgttttcaaaagcggaaaccgcctcatccggctgaagctggatgatggtgacgtcatcggcggaaagccccgctttatctaaagctttatagagaaaatcaaagccgctgctgcctttggctacagcgatttttttacctttcaattctttcaggctctgaatcccgctgcccttgtttacgagaatgccgtttgcctttaacccgtcctgagacagcccgatctctttaaaatcaatccctgccgcctgaccggaaatgaccggtgaattgccgacctgggaaaaatcaagcttatcggcggcaagaccttcaaactgcggaggaccgctttggaattcgacccattttacttttattccgtcttttttgaaggcctcttcaaaccagcctttttccttggcaatgagaagcgggcttaaactctgctggatgccgatccggatttctttcaccgttttcccgctccctcctgtcctgtctgcactgcatccggctgacaccatgactgctgcggctaaaagaatgatgatttttttcacttcacttcgtcctttctatatcccggacccatccgcaaaccggaggtcttccgttttctcaaactcagaaagcaccttctgccggacggcctgaaaatccgcagacgtccgattgcgcggatgcggaagctgaatcggcatcaggctgtgcagccggccgggctttgccctgaggatcgccagcttttcgcctaaatagacggattcatcaatatcatgcgtgaccagaatcatcgtcgtttttttctcgcgccatatatcaagcagcacatcctgcaaatgttttctcgtaaaagcgtcaagcgccccgaacggttcatctaaaagcagcacctccggctcgcgcaaaagggctctggcgatggcaacccgctgcgacatgccgccggataattcgcgcggataagcgttctccgctccctgcagcctgacaacctcaatcagttcatccacttttttccgaacggccgggtcgttcatattgagatcggcagcgatgttttgttttaccgtcagccagggaaacagccggtgctcctgaaagataaatccctgccggatgcccggtcccgatacattgcggccgtttattgtgacagagcctttataatcggtatcaagaccggcaatcaattttaaaagcgtgcttttgccgcatccgctcggcccgatgacagtcaaaaattctcccgatgcaattgacagctcaatatcattcagcaccggcgttttccggccttcatgctcaaaagctttttcttgtatgctgatggttacagccatctgtcttcccctctctttctgccgcgtgcgatcgaaaaacaaaaaggcccccatctccgattgcttgcagagatgggagccttcggcggtccgatcggcaacccgtttgtttttaaatttgaatatcatgttaattcaaattattccgacttgtcaactgttttttgtatgaattaaaaatgcgccttccggcataaccctgccaaagagcgcatcggctgtatcacgtatttacttccttttcttgccgggcgattttcaataatgtccgcgcgttgttgccgaaaatgttttctatatcttcttcccgcatattgatttcccggcaggtcctcacctgctcctgaagatatctgtatacatatcctctcggaaatccgttcgaatccgtcccgaagatgatccgttcagcaccgattaattcagatgtcttccgaaacagaatttccaaatcaagcgggtacggcatccacctcatccactgatttgagccggacgtgtcaatatacacattcggacagctccagcacagctgcagcagttcctgataatatccggcgccgaaatgcggaatgatgaacgggatatcagcatactctctcgcgacgcgatagatggagagcgggttgatgttgcgatggctgacaatgccccccgctcttcctaaaagcccgaagtgaattaatacaggcagccttttgtcagccagatacgtccacagctttttcagcgacggatcatgaaaatcgatgtctgtcagcggcccgaacagtttatatcctttcagaccgagctcttctaccgctcttttcagctcttcatacgcatcctcccgctccaaaggatgatatgcaaatccggtaaatctcgcgggattggcttgaataaacgccgccatccggtcattgctctctgctgttaaaaaattcagcacgtcaatgccgtacttatctaattcattctcccatcttgtcatcaaagcgatttcgccgtcatcgccctcaacatcatgcggatcaggaaaatcccaagtcagattcattctatctgaccgctcccggttataatcggaaaatgtcttatcgtttttgccgaaataaaggctgtacggcagatgaccgtgaatatcgacaggtttaaaatgctgccggaaaagcatacaatcgccgcctcccttaccgcctgacaataaaaaaaggcccttatccagtgaagaataagagcctcttgtgtccaagtcagcggtttctattttttctcatcttaaacccattattcacgtcagtcaagtaggctttcaaatccaaaccctttcttcgataataaaaataattattttataatcattataaaataatattgactttttactgataggtgatattatgtttttataaatctaaagaggtgatcacatgagttcaaataaattgacaaccagctggggcgctcctgtcggagataaccaaaactcaatgacggccggcgatcgcggtcctgctttaatacaagacgtccatctgcttgagaaattggcgcactttaacagagaacgcgttcccgagcgtgtcgttcacgcaaaaggcgcgggcgcacacggttattttgaagtcacaaatgacgttacaaaatatacgaaagccgcatttctgtcagaagtcggtaaacgcacgccgctcttcatccgtttctcaaccgttgcgggcgaactgggctctagtgacacagtgcgcgacccgcgcggatttgccgttaagttttatacagaagaaggaaactacgacatcgtcggaaacaatacacccgtgttcttcatccgcgatgccatcaagttccctgactttatccatacacaaaaaagagatccgagaacacatctgaaaaacccgacggccgtttgggatttctggtctctgtcaccggaatccctgcaccaggtaaccattctgatgtcagaccggggcattccggcgactcttcgccatatgcacggattcggaagccatacatttaaatggacaaatgataaaggcgaaggcgtctggatcaaatatcactttaaaacagagcaaggcgtgaaaaaccttgatgttaatacagccgcaaaaatcgcgggcgaaaatcccgattaccatacggaagatttgttcaatgcgattgaaaacggcgatttccccgcatggaaattatatgttcaaatcatgccgttagaagacgcaaacacatatcgctttgatccgtttgacgtcacaaaagtatggtctcaaaaagactatccgctcattgaagtcggccgcatggttctgaaccgcaatccggaaaattactttgcggaagtagaacaggcgacgttctctcccggcacattagtccccggcgtcgacgtctcacctgacaaaatgcttcaaggccggttgttcgcataccatgacgcgcatcgctaccgtgtcggcgcgaaccatcaggcgctgccgatcaaccgttcccgcaatgaagtgaaaaactatcagcgtgacggacaaatgcgttttgatgataacggcggccgctccgtctattacgagcctaacagtttcggcggcccgaaagagtcacctgaagataaacaggcggcatatcctgtatcaggtttcgctgacagtgtaagctataatcatcatgatcattacacacaagccggcgacctgtaccgcctgatgagtgaggaagagcgcgcgcgccttgttgccaatatcgtcagtgcgatgaaacctgtggaaaaagaagaaattaagctgcgccagatcggccacttctacaaagctgatcctgaatacggcagacgcgttgccgaaggactcggactgccatcaccaaaataacatcaaaaaacctgccggtctgcccggcaggtttttcctgtttattatcaataaaaccgtttttttctcaattatacgaagtggcatgccgcaaaatgatgaagccctttttctgacagcgccggacttttctcagcacatatcttcttggctgccgggcatctcgttcggaatttacagcctgaaggcggatcagaggggctcggtatatcaccctttaaaattatccgctcccttttcactccgggatcaggaacaggcacggctgataacagcgctttcgtataaggatgaagcggccgtgaaaagagctcctcctttgacgcgtattccacaatcgtccctaaatacataatggcgaccttcgtacataagtgctccaccacgcttaaatcatgagaaatgaacaaatatgacagcccgtgctgtttttgaaggctgctgaacaaattgatcatctgcgcctggatggagacatctaacgccgccacgggttcatccataatgataaattgcggcttgagcgccattgctcttgcaatcacgatccgctgccgctgccctccggaaaattcatgcggataacggtcgataaagtttgcggaaagtccgcaggcttcaagaacttccgccgctttatcacgcgcgttccgcttcaccgccaattgatgctcgatcatcgcttcaccgatggcttctccgatccggcgccggggatttaaagaactgaacggatcttgaaagatgagctgcgcttctgatctgaaagttttgagctcgcgccggctcatccgaaacacatcacgcccctgaaaaaacacctctcccgctgttttttcatgaagcctcaaaatggtcttgccgattgatgactttccgctgcccgattctcccgctaagccgaacacttctcccttttctatcgtaaaactgacaccgtcaactgcttttacgggatttttgcgggtctttctcatccccccatgctcctcgtaatattttttcagccccttgacctccagcaatacatcactcatctgctttctcctctctgtaaagccagcacgccgcctgatgccccttcccgaattcagtaaaatgcgggctcgatttccggcatatttccatgctgtgttcacatcgctccgcaaaataacaagacgatcccgacaggtccgcaagctcggggacctgccccggaatggtgtacagcgtctcccttctttgaccgataaccggcttggccgcgagcagccctttcgtatacggatgcttcggatcagaaaacagctttgcaaccggtccttcctccacaatttttcccgcatacatgacaatcacataatcagccatttcagcaaccacgccaaggtcatgagtaatgaataaaatagacatgcgaaattgctttttcatatcccgcaataaatccaatatctgcgcctgaatggttacgtcaagcgctgtcgtcggctcgtcggcaatgatcagtttcggttcgcagcttagcgcgacagccgtcatgatgcgctgcagcatgccgccgctcagttcatgaggatattggtgcataacctgctcggcatgcgggatctccactaacgtgatcagttcaacggccctccgccatgcttctttcttactcagcaataaatgttcgcgaatcggttcggccagctgctcaccgattgtaaacaccggattcaaagatgtcatcggttcctgaaatatcatcccgatttcgctgccgcggattttctgcatgtcttttggtttcaattccaacaggttccgtccggaaaaatgcaccgctccccgttcgattctccccgtctcgggaataagctgcataatggacaatgacgccatgcttttcccgcagccggactcccctacaatacaaaccgtttcctcctcatgtatcgtaaagctgacatcgtccacggcctttaccgccccctcctctgtataaaaagccgtttccaaatgcctcacttctaaaagcggttttttcatttcattttcacctgccgttttaccttaggatcaaaagcgtctcttaaaccgtctccaagcagatgaatcgccacaacggtcagaaaaatggccgttcccggcggaatccacagccacggacggagtgtaaaatccataaaatgattcgcagcttccatcatgtttccccaagaaggtgtcggcggagcaacgccaagcccgagaaaactcagcgccgattcactcagcatcgctcccgccacatgcaaagtcgccgctaccagtaataacggcaatgtattgggaagcaaatgatagaggattttccgtttatcactaagccccaaaacttccgcggccatcataaacggctgctccttcagcgacaaaatctgtccgcgtacaagccgcgccagaccgggccatccgatcaggcttaacatcatcataatcaggtacattctgtattcagaaggcactttccactccgacatcaccgcagccaaaatcaaaagcagcggcagtcccgggatggacatgagcatatcagcaatgcgcataatgatcatatcagcggctccccgataaaatccggccgcagccccgagtaaagaaccgatgacaagcgacagcaccattgaagcaagccccacggtcagagaaatctgccccgccagcatcagcctcgtcagcacatctctcccgtactggtcagttcccagccaatgatggattcccggctgctgattggcatttgaaatatccgtccgatctgttatgtacggagaaaaagacggcccgataaagcacaataaaaacataaaacataagaaaagaagactgatgaccgtcagcttatgctgcagcaggcggcggtacgtctgcttccaaagagaaggcggcgcccctttttgttttttcattccgaacaccccctatttcagcctgacccgcggatcaaccgcggcataagcgatatccgccaagaagttccccacaatcgttaaacaagacaaaaacaaggtaaacgccatcaaaaccggataatcacgataatgcacagattccagctgaatacgtccgacacccggccacccgaaaatctgttcaataatgatggctccggaaaacagtcccggcagttcaaaagcaagcagggtgatggccggaatgagcgcgtttttcaacgcatgtttccagatgacggtgcgctctttcaatcccttcgctctcgccgttctgatataatcctgtctgatcacgtccagcatgccggagcggaaataccttgtcagcgagccgataccgagcatagataaaatcacgaccggaagaatcatatgtctggcggcttcaagcacgtacgaaaaacctgtactcgtgcttccggtatcaatcatcccgccgacgggcaatattttcaaatccaccccaaaccacttaataaacagaaggctgataaaaaaagacgggaacgccatggaagcaaaaacaagaaacgtcacgatcccgtcaaaccatgagtatttcctgacagcggatatgacacccgttatcatcgcggctgaccatgtgacaagcaacgccaaaaatgcgacaaaaaacgaattccagacatatttccgaagcagtgacaggacgttctcctgatatttcaaagaaaacccaaaatctccgctgagcacatttccgagccatgtcacatagcgctgccaaatcggctgatccagcccgtaaagcgcttttaactcctgcgctctttcaggagtcaggtttacattggaatcaatatagtcgcccggcagcatggcgaataagaaaaaaataataaaggacgtaccaaataagatcacaagcatttgaatgaatcgttctgcggcataccgtttcataaaaagcctctcctttccgctgaaagggcaaaatccccgggatgcaccgggtattttgcccaaccgttctattgaattgagacatttgagagacttgaactgattccagaataattgtcaggcacaagcccttttatttttccgctgaccgcccttgcgctctgacggtaatgaatcagaatgtaaggcgggttttccccgagctcccggtacagctggtgataaatctcttttcttttgctgatatcaagcgtgccggctcctttctctatcagccggtccgctttcggattggaataccccgttacattattgggatggccggaagccagcttttccaccgtgtcattcggatcaagaatctgcgaggtggaaacggcggcaaggtcatattgtttgtcatttattttcgctacttctgtattaaaatccatcacttccggttttaatgagattccgatgtccgcgtaattttctttcgcgatcgggatgaaatcatcatccgctttagacgtgtaatagctgatttcaagctttttgccgtttttttcacgtacaccgtctttgcccgttttccagcctgcttcatcgagaagctttttggctttttcagggttaaacgcgtaccgattgacatctttatcatcataagcccacgaaaccggagacaccggcacattcgcgacttctccgtagcgtttaaagcggacatcgacgattttttgacggtcaagtccgtaaataagcgcctgggacactttcttatcttgaaaaggcggacgcttgtgattgacgtacacaagcccgtaatcattcacgacagatacgcttatattggcaaaaccgagactttttaaatgctgaaccgtatcatcatcaggtgaaaaagaagcgtaatcaaggtcacccgtttcaaacagctgaagggaagttgacggatcgataattttataaatcagcttttcggttttcggttttcctgcataatagtgttcattagcctgatagcgtatttcctgtcccggaagatattctgtaaactgataaggtcccgctccgagcggtttggcataaagctcttttaaatagtccagtttgccgaattgataattctttccgtagtaggattctgacagcacctgcccgcctaaaagaagcagcgacttcgcactgactttctcagtcgtgatttgaatggttctgtcatcaaggacgcgaatgccctctatcgtctttgcctttccttctttgtaagccttaccgcctttaatataggccgtggtgatatcttcatagcccgcgtatgcaggatcatgcagcagtgttaaagtgaatgcggcatcctttgcggtcagcggtgaaccgtcgctgaaaacgagattttttcttaaacggaacgtgtatgtaagctgatctttggaaattttccagctttccgcaagagccggggcaggcttccccgttttatccagtttgactaacggttcaaaaataggatctgtcgcatttccgtcccagccgttttcgtaaaagtacggcagaaacacgccgcccggcgcggaaatcccagcaacaaaagtgtcagttctggctttcgatttagcgggaatcgccgccggatgagaagctttaaattcctttgtcttgacatgggcaatacgtgtttcttcctttttatccgccgcagatgacggttcttctccggcactcccgaacgcgcaccctgataacatgatggataccgacagcgcgagtaccgttgtttttatcctccattttctctccttcatctttatcgaacccccgcatgcttttcatctatctttatataaatctgctccatctgttcctcatttctcataatctcccgtttgtttttctctacaagcagttcgaaattcaatgtgtgttttctgtacttttttcgttttttgctctttttgcgcacatgtgataccttttttaacgccacttttcatccctccgcttttcatttcattcatgactttcacgcaaaaaaggcccttatctgtttaaaagataagagccttcggtgatccgatcagccatcgtttggaaatatgtaatgattatgttaattcacacaatccctacctgtcaactataatttaaaatatcgtttccttccgggggttttcctcatacactctctcatttttccgcatatgctagaaaacatagcagattacaagtgaaagtgagtgagaatgtggaaaagacaacattgaccggtcgcatcgtcaaaaaagatgacccggactataatgctgcgagaaccaatatcaatttaagcctgcaaagatatccagacatcattgtgttttgtcaaaacaaacatgacgccctcaatgcggtgagatgggcgcgtgagaacaatgtgcctttccgtatcagaggcggaagacacagctacgaaaacttttctctgttaaatgacggactagtcattgatctcagtgaaatgaagaaaataagagtaaatgaggataagcggctggtctcgattgaagcgggagccgaattgggggaagtctaccggacactctggcggtacggcttgacccttcctgcgggaaccattgcgaatgtgggaatcacggggctgacgcacgggggaggaatcggatatttaacaagaactgccggacttacttgcgatcgtctcctccagctcgagatgatcatagcggacgaaaaagcgggtgctgacttgatcacagtcaaccgttcaaagcactctgatctattttgggcgtctcagggaggagggggaggcaacttcggcattgtcacatccatgatgtttaaagccgtgccgatctcgtgcgtgtctgttttttctgtcacttggggctgggatgattttgaggaagtatttaacacatggcagcgctgggctccatttacagacaaccggcttacctcatcaattcagttttggcctaaggaagtcaaccgcatagaagcgctcggtcaatttaccgggacaaaggatgagctgaaagaactgctggctccgttaatgaaagcgggaaaaccggcaagcggcatggtcaagacagtgccatttattaaagcggcaaccttttttaacagcccgggaggcaatcagccgcaaaagatgaagcggtcaggatcctttattgaaaaaccattatcaacacgcgcgatttccactttaaagcgctatttagagcacgctccgaacgaaaacgccagtgtgtggcagcaatctctcggcggggcggccggacggatcgctccggaccaaacggcattctactatcgcaacgcaatcattgcccaagaatatataacaacttggacatctgctgaagaagaaagacaaaatgtccgctggatcgaaggactgagaacgtccctatcaagagaaacgatgggagattacgtgaattggcctgatagagaaatcagaaactggctgcaaacgtattacggagaaaatgttcaccgcctccgtcaagtcaaaacgaaatacgatccggaaaatatattccgctttgaacagagcattccgccgcttcgccgttcaccgtttttctaaaaaagatgaagatgggcaaactccatcctcatcttttcttttattgatataagcggcttcccttctctgcaaactcttttgctttttctttcagtccttcgttgacggcctcgtcttcagtaagtccgttttccttcgcataatcacgaatatcctgagaaattctcatactgcagaacttcggaccgcacatcgaacagaagtgagccgtttttgcgccttcagccggcagcgtttcatcatgatattccattgctctttcaggatcaagcgacaaatgaaattgatcacgccaccggaattcaaaccgcgccttagacagagcatcgtcacggatctgtgcacccggatgccctttagcaaggtctgcggcatgtgccgcgattttgtacgtgatgacaccttctcttacatcatcacgattcggcagccccaaatgctccttcggcgtgacatagcaaagcatcgccgtcccgtaccagccgatcatcgccgcgccgattgctgaagtaatgtggtcataacccggagcgatatccgtcgttaatggcccgagcgtgtaaaaaggcgcctctttacaaatttccagctgcttgtccatgttttccttaattttatgcatcggcacatgacccggtccttcgatcatcacttgcacatcgtgcttccacgcaatctccgtcaattctccgagagtctccaattccgcaaactgcgcttcatcattggcatccgcaatcgaaccggggcgaagcccgtcaccaagagaaaaagcgatatcataggtcttcatgatttcacaaatttcttcaaaatgcgtgtacagaaagctttcctgatgatgagccaggcaccattgcgccataatcgcccccccgcgggatacgattcccgtcgtgcgtttagccgttaacgggacgtaacgaagcagtacgccggcatggatggtgaaataatccacgccctgctccgcctgctcaatcaatgtgtcacgataaatgtcccacgttaaatcctcggcaatgccatttactttttcaagcgcctgataaatcggcaccgtccccacaggcacgggacagttgcggataatccattcacgcgtcgtatgaatgtcttttcccgtggataagtccatcatcgtatcggcgccccagcgaatcgcccacgtcattttttcgacttcttcttcgatagaagatgtaacagccgagttgccgatattggcattaattttcacatgaaaattccggccgataatcatcggctcgctttccgggtggttgacgttagaaggaataatcgcccggccgctggctacctcgtctctgacaaattcgggagacacatgctcacgtattgcgataaactccatttcaggcgtaatgatgccttttctcgcataatgcaattgtgttacatttttccccggcttggcccgaagcggtttccgctgtaggccggggtattcagcggcacggccctcttttttataaccgttgtcttcaggtctcacggtccggccgttatattcttctacatctccgcgcccggtaatccactttgtgcggagcgcccccagcccttcatgaatatcaatctgtacatctgggtctgtatacggcccgctcgtatcataaacacggaccggcgcattctcctcttccccgaatgcccccgtagtcgcactcaggctgatttcccgcatcggcactcgtatatcgggcgaagaaccttctgcataaacctttttactgccggaaaaactcgacataatggaaatgttcgcttgctgtactgattgattttgcatacaaatctctcctttatcatttgaataacagaaccaagttcagcaccagcacaaaaaaaccgggttcaaagaagaacccggttttgcagtcagaaagaaactattattgttttcatcaacaataataaaacctttacttccccacgctggtacgaaccagatcaggtccaaagggttaagaagccgccgcttctctctcagcccgctcagacgggcacccccagtaactattgatttcgctctcatcgtaacataagttgtgtacaaaaaaaagcatattatcaaaattcagataacggtacggtcataagctctgtttcccgaacgcctttttcggtattaaaaacccgataaccctttgcggtttccctggaagagacagcccggaacagctgaccgtctttataatgaagcgcagcgccgtcatcagcggcatagccctccctgagtttcttttctgaaatcagacggtgatacaccggccggcgctccgcttctccgtcatagtgcggacaaaagcttcccggcaaaaatcctaaagctcttaactctctcaaatctccagccgaatccgtcaatccttcttcataccagcaaatcgccccggcgctgagacccgccaacatgatgccgttttcccaagcctcacgaagaataaggtcaagcccccactctttccataagacaagcatattgcgcgtatttccgccgccgacatatataatatctttcttcatgagaaaggatctgagatcagaacccggcggtttaaacagcgacaagtgatccggctcaccccgcagcttttgaaaggcctgataaaacctgccgatataattctccgaatctccgcttgccgtcggcaaaaaacaaattttcggctttgaccgcgccgactgctctaaaatatactgatccagcataagataatccggctccatggaaaagcccccgccgcccattgcaataatctgcttcaatgtcatcacctcttttttcctctagtataacagctcataaaaaggcgttatccccatttcggataccgcctttaaaaagtatttgttatctaaaaaatgaaaacgcaccgtataacacaacggagatccccgcggcgataagcgccggaacaagcttcgaacgggcatacttcacaacatcgatccccaacaccgtacaggttgtcaccgtattatcactgagaggagaagcaaacgctccaaatgttccgctcgcaaacacggccccgatcgctaataataaactggtatgtgactgaaccgccagcgttacgccgagcggcattaaaagcccccaagtcccccagatgacccgataaaataggatataacagcccccagtataaaaagagacggcgcaataaacatatgagggatccatgacgttaaatgagaagtaacatatttcgagaatcccagatcttcagatactgctgttacggcccaaatcagcgataacataataataacgttgaccaattcgtttccgcccttaataaaatgggtaacaagctcgcctgcatgaaaacgctgaaacataaaaagagcaaatgctgcaataaccgctgccaataatgcggttaacatgacgccaagcatatcgcttttgataaaagcattcaaaaacccttgtgcttttgaatggccgtcccaccagctgagaaagagtgttaatagcaaaaacagcccgatcggaatgattaaattccaaggccgaatcggtgtttccttaatataagcacggtgcgccgaatccagctcctcctgctggtcagcatgctcattactttcgaacattcccgtatgttcaccgtgaatatctgagatcgtccctgtttccatgttaaatgaacctgagctttttgaaagcaacacaccgctgttccgcggaatcggttccgtatttttgttatgtttgcgagcagaagtttgtccgctcttttctgttttttctaagctttcgtccgctttttgtttcttaaaaaagcagtaataaattccgactactataatcacaatggagaaaaaattgaagggaatacttttcacatacaccgtgtaagccggctgatctattcctgacgttttaagggcctgtccgataatggaaaccatgtagccgacaaatgccgttgctatcggaatcaaggcaatgacagggtttgccgtaaactcaatggcatacgcaattttctgtttcgacaggtccagacgcttgcttaatgctttcatgatcggtgcaattgtgacgatgcgaaagtccggttcactgaacgtgccaaatgtcgacagccatgcaagcagcatcgcaccttttttggttttaacttttttactgatcaaatggacgaatccttttatcccgccggtcagctttataatccctacaaggccggcaaatgaatatagaaacacaatgattctaatattattggtgacgacaatgttgctgattacatattgaaccatatgttcaatcccgccaagcaagctgggatgcaaaagatagcttccgaccagcaaaccgacaaacagaccggactgcacttgctttgtaatgattgaaatgggaatgaccagaataaatgggataagacaagcccaagtcccttccataaaaaacacctctttcaaagaacttcttgttagtatctttgaaaaaagcggatttatacaatcagcaggtatcatgttttcacaagccttggaggatattttaatacaacaaaaaaggcttctacatattgtagaagcctttgtataccggtggccggggtcgaaccggcactccagaaggaacacgattttgagtcgtgcgcgtctgccaattccgccacaccggcatgtaatgcgtcgtgttcaaccgacgtatataaatataacatgtatttcataaaacgtcaacggttttagcaaagttttttaaatggtaatgcagtatatacgatacaagcaagaaactgatattgatagtcattacgtttttattatataaaaaaagtgatctgcaatatgcaaatcactctcatatatgttttataatgtgaaaactgatgaccaatttaacatagttcgttcaaagttaaattggtgccgagggccggacttgaaccggcacggtagtcacctaccgcaggattttaagtcctgtgtgtctgccaattccaccaccccggcaatagaaaggcgacacccggattcgaaccggggataaaggttttgcagacctctgccttaccacttggctatgccgccgtaatttggagcggaagacgggattcgaacccgcgacccccaccttggcaaggtgatgttctaccactgaactacttccgcaacatgtaaaagaacttaatacatcttatgctgttgtttttaaaaaaatgcaactgggctagctggattcgaaccaacgcatgacggagtcaaagtccgttgccttaccgcttggctatagcccaatgataatatggggcgattgatgggaatcgaacccacgagtgccagagccacaatctggtgcgttaaccacttcgccacaaccgccataatctgaagatgaataaataaaatagtggcaggggcagtaggaatcgaacccacaccggaggttttggagacctctgttctaccgttaaactatgcccctatttataaaatggtggaggggggcagattcgaactgccgaaccctgagggagcggatttacagtccgccgcgtttagccacttcgctacccctccatcatttagagtgccggccagaggacttgaacccccaacctactgattacaagtcagttgctctaccaattgagctagaccggcaaatggtggctcgggacggaatcgaaccgccgacacacggattttcagtccgttgctctaccaactgagctaccgagcctttttataaatggcggtccggacgggactcgaacccgcgacctcctgcgtgacaggcaggcattctaaccaactgaactaccggaccatttttttggttgcgggggcaggatttgaacctgcgaccttcgggttatgagcccgacgagctaccgaactgctccaccccgcgatgataatggtggaggatgacgggctcgaaccgccgaccctctgcttgtaaggcagatgctctcccagctgagctaatcctccatcatataagtgacccgtacgggattcgaacccgtgttaccgccgtgaaagggcggtgtcttaaccgcttgaccaacgggccctggtattttttcgtttgttatgtattgataattagtggcggagagcaagggattcgaacccttgagacggggttaccgcctacacgatttccaatcgtgctccttcggccactcggacagctctccataaatggctccgcaggtaggattcgaacctacgaccgatcggttaacagccgatagctctaccactgagctactgcggaatgaagtctgcctggcgatgtcctactctcacagggagaaacccccgactaccatcggcgctgaagagcttaacttccgtgttcggcatgggaacgggtgtgacctcttcgccatcatcaccagacgttttagtgacatgtattattatactatgtatttcagaaaaagcaagagttttttaaaaaaattctctcaaaactagataacagtaagcatacattcaaattggttaagtcctcgatcgattagtatctgtcagctccatgtgtcgccacacttccacctcagacctatcaacctgatcatctttcagggatcttacttccttccggaatgggaaatctcatcttgaggggggcttcatgcttagatgctttcagcacttatcccgtccgcacatagctacccagcgatgcccttggcagaacaactggtacaccagcggtgcgtccatcccggtcctctcgtactaaggacagctcctctcaaatttcctgcgcccgcgacggatagggaccgaactgtctcacgacgttctgaacccagctcgcgtaccgctttaatgggcgaacagcccaacccttgggaccgactacagccccaggatgcgatgagccgacatcgagg

SEQ ID NO: 10 - DNA, 119298 bp, Bacillus methylotrophicus
gcgacgggaactacgggtccaaccggagccactggagcgacggggtcaactggggttacgggagataccggatcaactggggcgacgggaatcacgggtccaaccggagctactggagcgacggggtcaactggggttacgggagataccggatcaactggggcgacgggggataccggaccaactggggttacgggagataccggaccaactggggcgacgggaatcacgggtccaaccggagctgctggagcgacggggtcaactggggttacgggagataccggaccaactggggcgacgggaatcacgggtccaactggagctactggagcgacgggttcacagccgacggttgcttttcagaatgcggttgatcaagtggtgattcctttagatggtactccgacaagtgtcttgacggcaactataactgcagttgccactcaattggtgaagattgatacgacaattcagcttaatatcacccttaatccgctgacacctgatttctccctcgtgctttctcttgacttggagagaaatggaattataatcagcaccgaaactcttgaattgaatctattctattcagccgggcaatctattattattcctcatacgtttgttgaccaagttccggcttccggaataactgtgtataatatggtattaacagttggaaatacaaataatgtaacacaagtcgatattacaaaccgggctttaaacgcaacatcattccctctgccataaatgtttaaaaggtgatcgttttttcagtcaccttttttgtatcgctttgataaccatgagtttagatacaatagttatgtaaagtcggctgcaatgaaaatacgaatacaagagagggggagtgaattggcgattggcaacctcattgtcaatggtggttttgaaagtggagatttaaccgggtgggacgtggcaaatgccactgttaacagtatatttgcccattcaggaacatactcagcacaatttttgattgaaacaaacactgcttcactttcacaaatcgtcccggttacggtcggtcaggcatatcattttcaagtttcattaggaaccattggaacggcttcaaaccctcaggttaacttgcaaatcttatatttaaattcattaggtgtaccgattgcaacaggtttagatgcagcgatcacgataggccatttaccgaatgtaatttttaatacatggacagaggtataccaaacaacatcagttgttcctgatggaacaactgatgctcagattatgatcaacaaggcatctgtgaatacgaacacaacaatactaattgatgacgtgtcgctccttcaagtcatagagaattccggtccgacaggctctacaggatcaacaggcccaacaggacgaaccgggacaacgggagtcacaggatcgactggagccacgggagtcacaggatcaaccggagcgaccggagtaaccgggacaacgggaccaacgggagcgacaggaataacaggcccaacaggacgaaccgggacaacgggagtcacaggatcgactggagccacgggagtcacaggatcgactggagccacgggagtcacaggatcgactggagccacgggagtcacaggatcgactggagccacgggagtcacaggatcaaccggagcgaccggagtaaccgggacaacgggaccaacgggagcgacaggaataacaggcccaacaggacgaaccgggacaacgggagtcacaggatcgactggagccacgggagtcacaggatcaaccggagcgaccggagtaaccgggacaacgggaccaacgggagcgacaggaataacaggcccaacaggcccaacaggcccaactgctagtgcaccgaccttgctcttcacaagaaccaacgggccgctcactgtttacccgccgttaaatacagaagttcctgttgctgaactggaaattccagttaatactttgcagaatgtaaagtttgattattcagtcagcgtcgatgtaacatctacagccaattcaaactttgtctttgaaataagattatataggggagcagtacagattcatacaagacttttgtcaaggtctattattagcgcaactactcaacggtttgcagtagctgatactacagtggatacagcgccgaccgcgggaacgaacacgtaccagctgagagttatttttacaactgctaataatataacaacagcgacagctctcaatatcgattttaacagcattcgtttcccgacaacataatgacaacagcagactggtattttaaagatgaaagacctgacttatgcacagttaggtcttttttctctaaaagctatgcatggtgcagccttaagaacatttaaaaatttgcccaatagaagtgggattttgccacacctttttttctcgtggaaatattatgcaaagagaggtggtgtaatgagaaaaggagatacttggtataacagatacgactcttgggattacgactgccggaatagtaatgagtgttgctgtcattttcaacataaaagaagaaatcaaaggcgcagttatcaaaatcgggcccattgctgtgaagaattctgttgcaaaacttcttgctgtcatgaaagatggtgtccatgctgtcatccaaatcattttcatgtaagaggattcaccggagcaacggggctgaccggagcaacggggctgactggagcaacggggttcactggagcaacggggtttaccggagcaacgggattcaccggagcaacgggctcgaccgggaataccggagcgactggggtaaccggcgtcactggagatcccggcgccacgggagtaacgggctcgaccggagcaaccggtgcgactggaataaccggtgccaccggggtaacgggagcaacgggattaaccggcgccacgggagtaacgggggcaactggggtaacgggggcaactggggtaacgggattaaccggcgcaaccggagtaacaggctcgactggaataaccggcgccaccggggtaacgggagccactggagtaacgggagcgaccggagtaacaggtgcaactggggtaacgggaacaaccggagtaaccggggtaacaggagcaaccggggtaaccggagctactggatcgaccggaataacgggagcaacgggagtaacaggctcaaccggagtaaccggcgccaccggaataaccggagcaaccggggtaacaggagtaaccggagcaaccggagcaaccggggtaactggagtaactggagtaaccggagcaaccgggctcaccggcgccaccggagtaaccggcgcaactgggataacgggagcaacaggagtaactggagtaaccggggatactggagccaccggcgccaccggagcaacaggagccaccggggtaacgggagtaacgggagtaaccggcgcaactggagcaacaggagtaaccggcgcaactggagcaacaggagtaacgggagtaacgggagccacgggagtaaccggcgcaactggggtaaccggcgcaacaggagtaaccggggtaacaggagtaaccggggtaaccggagcaggcgcgatcattccctatgcttcaggtcttccaactgccgtgacgaccattgccggcggattaatcggaacggtgagccttgtcgggttcggcaattctgtgacgggcgtcaatgtcggagggggaggtgcaattgatcttaccggggctggaggaactctgctgaactttgctttttctgctccgagaagcggaaccattacatcaattgccgcctatttcagtacaaccgcagcattgtcgcttgtcggctcgactgttacgataaccgcacaattatacagttccacagtgccgaacaatacgttcacgccgatccccggagcatccgtcactttagctcctcccctcaccggcatattgtcaatcggcagcatcagcaacggaatcacgacagggctgaacattgcggtaactcctcaaacccggctgttaatggtattctccgccactgcgacaggcctttcgcttattaatacagtggcgggatatgcaagcgcgggagttacgatttcttaagtgaaaacggccagactggtgcggatcatctaagcttggagaagatatcactttttcttcaagcttttttgtttttgcgtctttttgggtaaataaaggctgacgggaatttcccgacagccggcagaagtatttacatgccttttgaagttaatcagtatcttaatgaagacgtttttagtgagatcaaatcatccgttgggccgggagtgtgaatcatcatcgaaacagcggtgccctcatccggggtgctggtgatcgtcaattcgcttccgcaaaaatgcttcagccgccgattgatatttttcaggccgacactgcgattaacatcagaagacaaaatatctttctgtatgtccggcatgatgccggttccattatcctccactttgataaaatacgtgttttcgccttgttttttcgctgtcagctttatccgtccgccgcctcttttcttactgatcccgtgatgaacggcgttttccaccaatggctgtatcattaaaggcggaagggggaagtcaatgtcctgttcaatatcaaaaaggatatcaatccgtttgccgaagcgtgttttttctatagaaagatatgacgtaatgatagaaagttcgtttctgaatgagctgatgtccgaagtgttttgaaaatcaaaactcatccttaaatagtttgtaaatgcagcagtggtttcccgtgctttttcaatatccaaatggctgagcgcgatgatcgtatttaatacgttgtaaagaaaatgaggcttaatctgcgactgaagaaatgccatttctaaatttgtggcttggtgagccgtatgcttcatcaaaattaaatttttaatacgcgcggtgaattcagagtaatgataaggcttttgtaagatgtcgtttgctccggcatgaaacgccttgtatttgtcatggctgataatggctgccgtaacgataagaaccggcagatcgaccatgctgaatctttcgcggatgtttgtgcagacttcaaaacccgtcatgtcgggcatcatcaagtctaatatgaccaagtcaagcttcgaggaagagacagcttgaagcgcctcttttccgctttttactgcgattacgttataaggaacaccttccagcatatcagttaaaattttcaaactctcgatgttatcgtcgacgatcagaatcgtcggagcatcgattttttctgagtaataaggcgtgaccagcgaaatatccgacattctctgcccgggatgtgattcaggaagttcggtctttgcttccggtaaagaatcaatttgagcggcgggtaacgtaaaatgaaaggctgatccttgcgccgccgctgactccgcccagatgtccccgttttggagcttgacgagctgtttcacaatacttaaacctaaacccgttccatcttcttccgtccctcccgcttgctgaaaagaatcaaaaatggtttcaagatcagcctcaggaatgccgctgccggtatcggccaccgtgatttgaatcattttgtcattcaggctttcagcagaaagaataatgttcccctcggatgtgtacttgattgcgttttcaacaagattggttaagatttgccggaatcggttttcatctgcaagcaccaaagggaggccgtccggcacatgattaagaatggcaagttttttatgtttggataaaagccggtagaagttcatttcactgcatatgacggcatgcacatcgacgggaaccggacgaatctgcagcataccctgcttcattttttccaagtcaagaatatcatttacgagatcagaaagtctgtagcccatacggatgatcagctgcatattttctttctcttcctctatcgtcttcttttttctgccggctacaagggtttggcatatattaataatgctgttcagcggcgtcttgaattcgtgtgaagttttggcgataaattcatctttcagttggtcgattttgactaatttccgtgagaggacttcattgtcccggaaagctccggcgaattgctgcgccatcagaagaaccaccgccaataaagcgatgactgtcggcaatgaatagagcgaattaaaagaaaaagccgttttgccgctgtaagctgaaatggtagtaagaatcacaaaagcgctcatcgagacggatgcgagtgtaaggtacgtgcttccttttatttttcttatggcggcaatcgtaaaaatatatgtaatataaaacagagtcgtaacggcaagcacagaatgtaaaatgtatgagagatggtcaatgaaacttccggacataaaatcagtgatcaagataatcccggataaagcggttaaaaaggtgatcgtcgtttttgaaacaatttctctgtatgcataaaagagataaagaaaaaccgccatgctgacaagcacggttgagatgatacgcaaggaattcagcaatgaaaatgaaatagacggaaagaggagaaagataattctttctttcccgatcataagaataatggcagaaaaaagcagacacatcacggaaaagaacaataaatgtttatcctttgtccgttgcagaaaaaagccgagaaaatataaaccggtaatgaaaaaagccgtaatcataatggaatcattgaaaaaggaaatttgattctcgcgtataatttgttcttgagtcccaaacgttatcggttttgcgatcccccagccgggaacttttccgaaattcgaaaaatgcaggacgagttcattgtcacccttgcgaagcctgaaaaagctgctgtacggtttgttctgcgccttaaaatcagctttttctgtaggattgccgctctgtccgattaactttccattaagataaaggcggtttgaactgtagatataagatgtgctgatccccaaaacctgattgtcttcatttgatcggattgtcagtttgtacgtcccgtaatccacatcggccgttttgccgaacagcttcacattgacggggacatcaacgagtacggggttttttccttttgctgaatgaagcgcctgcggtgacagcatctgatttggatatagaatccatttcccgttcagctggacatttccatccttttgaaaatcccacttttccagattgatcatgccctgttccgcttgagggagggatgatcctgaaaaatgattcaggaccataaaaaccataaagaaagcagcgtagccgcaaataatcgaaatcgaaataaatttttctttcacatcattactcctttatcccattcaggggcattctattatcctatgtaatgtataaatattgtaatcacaaacgttgtaatacaacaagaaaaagaaaaagaatccaactatatagggcattggacatggtataattgaaattattttcagatatatctatattgacgggtgggatgcggtttgaaagcgttaattgtggatgatgaggaactggcattgcttcattttaatcgtatgcttgagcggacaaacgcctttcaatctattataacgtttcaagatccggcggaagttctggagcattcggaactttcagcagctgatgcggtgtttcttgacattgaaatgcccgggataaacggtattgagcttgctgaatcgattcaggagctcaatgaacatattcaagttatttttatcaccgcttataatgaattcgcgatcaaagcgtttgaattaaatgctgtcgattatcttttaaaaccggttgacaatgcccggctgctgacaactgttgagcgaatccgtatgaataaaaaactcaggacggcagaagagaataccgggacggattatgttatacaatgttttgggaacctggacttttatcaatcggtaaatggtgtcaaaacatacataacagtcaagtggagaacatccaaagcccgtgaactgtatgcatttttacttcttaatcaagggcgtacggtcagtaaagacatgctgatggagatgttttggcctgcttatgatgtatcaaaagcaagcacccagctctattcgacaatatatcaaatacggaaattaatcggtcagctgcccttcagccaatcaatagaaaataccgatataggatacattctccggctttccggagtaaaggttgatacagttgaatgggaaaaaacattaaaagaggctcctccggtcagcgcagctgcactaacccggcacctggacattgtcatgtcatatgagaaccattatctcatggagaatggctatctgtgggcggagccggaaaaagcgcgtctggcccatctgtggctcagcaaagcgtacgaactgattggttttctcatccaagagaagaacgatcatcaagcgatggatgtttgcctgcaggttgagaaaatagagcccggtgacgataaaattatacaatacaaactgcagttatttaataaactgggaaaggtagaagaggcgataaaggaatacgaacgctataaacaattgaaggataaaatcaattgacgattgaatgaccggaccggctgatgccggtctttttttgtgcgctatttctgaaatgatcccatgtacagaatttgtataggccgatttcatacaatgtagtttggttcggataaggagaatcccatgcttaccggcttgttcgaacgtaagtctatataaaaggggaggaataagacattgggagtgaggaacttttcgttcagcccgaaaaaaagcaaaaggctgagggcggcattgatttcatgcttcacgctgtttttcatcttcagccaagttgtcagctttactccgatcgcagccgcttccggatcacaacaaagcgagagcgggttctttgattcagttgcagtcaaagacggcagacagcagactgttgacgggtcaaaaggaagtgagcccgctttagcaccgggagataaagtgacactgacatacgaatggtcgctaaaaaacaaggaagatgcaagtgaccggaatatcaccttaaagattccggaaagttttacattagataacgatgccgaaggtgagctgacatcagctgatcgggtgatcggtatatataaagctgaagcagacagcagcacgctggaagtgaaagtgaacgatgctgaagcagatgccggggatgccaaaggctccattacactgtcggcgaagtttactcccgacataacagatgagacgaaaatggcaaaagctctttttcaactggatgccggcaagacccagcaggtgttaatacctgtgaagaaagacggaacaacggattccgaaacagaaaaaaacacctcttcaacacctgctgaacctcaggaaaagacagagaaaaaatcagcatctgcggacggcggtgataaagcagaacagaaaacgaaatcaaaaccttctgctaaacacagtcaatcaaaaatggcggtttcaagcaaatctgccgctaaaagccttcaatcaggcggaagccggattacgcaaaatattttaactgatgtgaaattgacggatgaaaaaggaaaaccatatgacaaaaacaaccctgcgaatacgaactctccggcaaatatcaccattcaatgggcgattccgaatgagctggggaaaacaataaacgacggtgatcgatatgaatttgatctgcctaaagaatttatcatgcataatgacattacgaaccagccattgaccgacggcgatagtacgtacggaactttttccattaatacgagcggccatgtcatcatgacgtttaacggcgaggtaaaagaagatactaacgtcaaggggtcattgtatgtaaacacccaattcaatcagaaagaaataaaaggatcaaccacacaaaagattaagtttccggttaactctgatacgccggacgtaacggtttattttaaaccgaatgtcaataaaaccattgagaaatcagggtcattggataaaggtattaatcccggaaaggtaacgtggacggttgatcttaataaaaaggaagaagaagttaaacatgcgaaattgactgaaagccttccggacgaattgattttccgctctgtgaaagtgtatgaacttgatgtgaatattgacggctcggtgagtcagggaaatgagataacttcaggttataccgttggcgaaaacggtagtgtcaccttcgccggaacgatcgattcagcctaccggctcatatatgacacggaaattaaagatgaggcaaagccgggtaaaggcggaaacatcacgctgacaaacaaggcggcattcagcggagacaatgcggagccgatttctgcggaagcttccgtaacagcgggttacggaaaaatgatagaaaaatcttcgacaggttataaaggagaatcccaaacgttcagctgggctgttatgtacaactacggtgagaaaaagattgatcaatccaaagccggcatcaaggatacgttcggatcagacgatctgcatcttgttcccggttcattgaaagtccttcctattacattcagccagaacggcagcgaacaagagggcgccccattaaaagaggatgaggattatacgctgactgataacgggaacggctttgaaataaaattcaagcaaactgtcacaggagcatataagatcatttatcaatctcaagtcaacgatggggtcattattgacagtcctgtcaaatacaccaatacagcaatgacagatacaggggaatcaaaggaaactccgggaaccgccattcagcagaatctgatcaaaaattattcaaatgcagactatgagaagaagacggttgattggacaatcacagttaataaaaacggttacacaatgaaagactggacgctggatgatcaattcaccagcggaggcctggcgctcattgacgattcatttcacatgcaagacacgactaacaaaacgctgaaagaaggaacagactatatattaacaaaaaaacccggaaatcaaggctttacaatagcattgatcggggattatgcagaaacaaacagtcagtttaagatcacgtataagacaaaattcaacgctgacttttcaaacgaccccattaagaatacggctgagtccacatggacggataaaaacggcggcaaacgcacaaataaggaatcgagcggcttcacaccgaacaatcagacgtcccataatggattcaaaaacggctcatacaacgccgtttcaaaagaaatcacatggaaagtcggcatcaattataatggcgaaccttcaaaaaatccttatataaaagatacgatcacagatggtcagcaatttttgcatggatcggttgctgttaaaacgtataccatcagcaaaaacggctccatcactgaaggagaggcgctggatccttcaaaatatgaaatagaggagccgtcagacggcaacaaaaatacgttaatcgtacgtctcaaaacagatgacgctgtaccatacctgattgaatttaaaacgtcattaaaaggccaggtcattaaacagagtcaatatacaaacaaagcagagtactttaataatgaccatgcagaccgaacactgacgggttcagtttccatcgcaaacggaggaaacctgatttctaaaggcggcaaacagaacggaaacaatatcgattggaacatcaatgtcaatgccagccaatcgacactggatgacgtaaaagtcaaagacaccccggatgagaatcaaataatagatgaagattcttttaaagtatatcaagcaaaatataatgagaacggcgttatgaaagacagcagcggaaatcttattccgggtgatgtgcagcttgagaaagataaggactataaagtagatatgaaaactgacaatgccaccggtgaacaatcatttgtccttacctttataggcggctataaacaaatcgatcgtgcgtatgtcatacaatatcgttctctcattaatatttccggcagcagcggtcaggtcagcaacaaagtgtcgatatcagggacaaatgttgaggagcagacccaagagaacaacagctcagtgtttgtcgccatttcaagcggcggcggctcaggatcaggagagaagggaagcctgacgatatctaaaacaggatcagacggaacatctctttcaggagccggctttcaattatggtctaaagacggcaagcagctgctgcgtacgggcacaacagacgatgccggtaaacttacgcttgggaatatccgttacggaacgtatgtactgaaagaaataaaagctccggacggctacaccatcagcgatgcttatgtaaacggggtctccgttacgattgacggcaaatcctccgcagcaggagcactctataaagtcataaatcaaaaaaataaggtgacgcttatcaaaaaagacgaaaacaataatcctttggccggtgctgtatttaagcttgagaaaaaattaagcgacggcacctatactctgataaaaaataatattgaaagcgataaaaatgggaaagttgagatcaacggtttgcccgccggatactatcggctgatggagacgaaagccccatcagggtttatcgtaaacacaaaagccattcacttctcaatcgcaaagaacgaaaagaatcaagtacctgatgttgaattgggatcaatggtgaattacaaaggaaaagccgctttaacgaagaaagatgcagacggcgggaatcttgaaggcgcagttttcaaaatcgtcgaccgtgatggaaaaacggttcagaaagatctggtttcagataaggacggaaaagtagaaacatccggccttgcacccggtcattacgccttcatcgaaacgaaagcgcctgacggctatatgttaaatacggagaaagtggagtttaccatctcagaatcggcggaaggaaagccggagtcaactgacgcaggaacggccgtcaactataaaggctctgtccggctgacgaaggaagatgcggaaggccgaaaccttgaaggtgcagttttcaaaatcatcgaccgtgatggtaaaacggttaaagaagatctggtttcagataaggacggaaaagtagaaacatccggccttgcacccggtcattacgccttcattgaaacgaaagcgcctgacggctacatgttaaatacggagaaagcggagtttaccatctcagaatcggcggaaggaaagccggagtcaactgacgcaggaacggccatcaactataaaggctctgtccggctgacgaaggaagatgcggaaggccgaaaccttgaaggtgcagtcttcaaaatcgtcgaccgtgatggaaaaacggttaaagaagatctggtttcagataaggacggaaaagtagaaacatccggtcttacaccgggtcattacgccttcattgaaacgaaagcacccgacggttatgtgttaaatacggagaaaaaagagtttaccatctcagaaacagcggaaggaaagccggagccgtttgacgcaggaacggccgtcaactataaaggctctgtccagctgatcaagaaggatcaagacggaaacgttttagacggtgcagtatttaaaatcattgacagtgatggaaaaaccgtaagagacgatctgatgacaaaagaaggcggcaaaattgacgccggcggtttggcgcccggaaactatcaatttgttgaaacaaaagcgccggatggttatctgctgtcaacaacccctgtgccgtttacgattaaggctgagaacagcggaaaaccgaatcaggctgccctgactgcagttaacatcaagaacagcgttgttctcacaaaattggatcaaggtgacaaacggaaagtcctgcaagatgcgaagtttaatctgacagatgcaaacggcaaagtactgacagagggcctgacgacagatgagcacggacaaattattgtacggggactgaaagcgggcgaatatcaatttatcgaaacaaaagcgcccgaactttacagtttggatcaaacgccaatatcattcaagatcacaaataccgacataaaaccagtcgaaatcagtgcggagaatacactgacgccgggtgatgtcacactgacaaaagtggatcatgacgataaaaataaggtgctggaaggtgctgaattcaagatcacggattctgccggacatccggtaaacaccggcggcagcaaagaacggccggcggtatggaagacggatcaaaagggccggtttacggtgaaaggattagcgcccggacagtatcgatttatcgaaacaaaagcgcctgacggctatcagctgaacgaaaaaccaattgaattcacaattgaaaaaggacagttaaaagccgttgaggtcgtcgtttctaataagaaattaaaaaatcccgcacctgggaaagacacaccgaatcatcaaacgaatcaaggcgggcatcatcctgataccaatggtaaaaccaatcacccggatacaggcaaaaacctgccgaaaaccggtgatacggacggtatgatgccggtcacggccggtattctgctgctattagccggcggagccgcggctgttgtatcaagaaagaagaaagcaaggaatagatagacgttatcgcacctgatcatgtaagaatcgatcaggtgctttttttaaaagagaatcatttctcaccaaatactcaccgcatgacgtacaagaaaggaattttcttcatggttaaaaaaatgatcattgccgttcttattttgtccgggctgcttctcatttcctctcctctcatgaaaggctgtttgatcgcgtacctcagtaaaagtcaaattgaatcggaattaaccgcagaacaagcgcggaaaaataacatgaaaaaagcggactatgattttgaatccattcatccgcccggtttcagggaaacagttcagtcaagttttaatcgcaaaccaaaaccgataatcggacggataaccatcagcagcatcgatttagaccttccgattttaaaaggcacaaccaatgaaaacctgctgatcggcgcggcaactatgcgtccggatcagaaaatgggcgagggaaactacccgttggcaggccaccatctgaagcaggagaacctattgttcggccctcttttacacataaaaaaaggcgcgcaaatcgtgatgaccgactttagaaaagactatatttattctgtaacatcaaaaaccatgatttcagaaatagaagcaaacgcaattcaggagacaaaagataaagagattacattaatcacatgcgacaaggcggtaagaaccgaaggacgcctggccgtcaaaggaaaattaattgatatttccggtcattcaaatgtatctcggccatcatagagaaacactttttcaactgaatatacgtccgttgttaaacatcccgagactggcttctgtcagtctttttttgcgcagcgattataaaaagttatccttcttatctctcttgagggaaattataccatactgcagaaatgacaagagaaaaagatcacgaaaattctcaaaaatgagaaataaagatttgaaaaatggtatgattttaggaggaaaggacggctggtgctgtgttggaagcgaagcggttttatgtctctctgcaaatgaaaatcgccggattaattacggctttattaatacttgtcatcggaacgctcacggttatatttgcctttcagcaattaaaggaagggcagaagcaggctgaacagctggcggtgcaaacggcaaaaaccatttcatacatgcctcctgtaaaagaggcgttccggcttgcggatcaagaggcttttacaaagttagatgtcattgaacaaatgaaagaacaggcaggcgcgcacgccgtctacatcactgatcaaaaagggcatgttgcatttcattcggcccgaagcagtattccgaaagaaaatcaaaatctgcaaaataaaaccatcatgttcggcgggtcaccggtttccgacggaatgaaggctgtccgggggagcgccccggttattttggaggaaaaaaatcataacgaagtcgtcggaacggtgacagtcgagtttttacaagatgagatagaaaaagatatgaaagcgcatctgcggcatttaggctattttgcatgtttggtgtttcttatcggcatcgggggagcggcggcgctcgcaaaaagcatccgtaaagatacactcggccttgaaccgcatgaaattgcagcgctgtacagggagcgcaatgcgatgctccttgcgattaaagaagggattatcgccgtaaacaaagaaggcgcggtaaccatgatgaatttatctgcggctgatatgctgaatctgccggaaccgatgatcggaaggcatataaaagaaatcatgccgggcgcaaatctcatgccggtgttggcagggggagaattaccgccgaacgtggaggtgcgtgccggaaataaagtatttatcttaaacgtgaaagaaatgaagcagaccggacaagtatacggagcggtgatcagcttccgggagaaaacagagctcaagaaactgattaacaagctgactgaaatgaaaaaatactcagaggatcttcgggcgcaaacgcatgaattctcgaataagctttacgcgatcctcggtctgttagagctgggagaatataatgaagccattgaactgataaaagaagagtacgccatccagaatgaacagcatgaaatcctctttcaaaacattcattcacagcgggttcaggccatactattaggaaaaatgggaaaggcgtctgagaagaaagtgaagctttcaatagatgaaaacagctttttagaatcgctgccggagcatgtgggttcatcccagctcattacgatcatcggaaatcttattgataacgctttcgaagccgtcgccgaaaaagagaaaaaagaggtcgccttttttatgaccgatatcggcagggatatcgtcatcgaagtggcggactcaggagacggcgtgcctcaggaaaaaacaaaaaccatatttgaaaagggctactcttcaaaggggacgaggagaggatacggcttagccaatctgaaagaagccgtcagtgaattgcagggatcgatagagatttcgcagcaaaagagcggcggtgccgtatttacggtgtttataccgaaagaaacgccaaagggggaatcggtgtgattaacatcgcgattgcagaggacgactttcgaatagcgcaaattcacgaaaaatttatcgaacatcttgatggattcaatgtcatcggtaaagcaatcaatgccaaagacaccatatcgctgcttgagaaacggcagcctgatctgctgcttttggatatttatatgccggatgagctgggaacagatctgctcccgcttatccgcggccgttttccttccgttgatatcatcattattacggcttctgccgaaacaagactgctgcaggaagcgctcagatcaggcgtttcccactatgtcataaagccggtgtcggcacataaatttacagaagtgcttttgcagtaccgtgaaaaaagagaatggctgcactcacagccggagctgagccagtccgttatcgacatgtttttcggaagcggtcagaaagaacaaaaacagctcaatgatctgccgaccgggattaattcgattacgcttcaaaaaatcaaaaacgcgctcagggcggcccaaaaagggatgacggctgaagaactgggcgaaaaaatgggcgcctccagaacaacggcgcggcgctacgccgagtttctcgtttctcgggaagaagcgctcgctgaattagagtacggcattatcggcaggccggaacggaaatattatttagcacatgaataagggatgggagaaatgaagcggttgggagtgcttcttgtcatgctggcggcgctggtttcttttgacggacggcagatggcgggcatccgttcagccgaagggccggttgaaattgtcgtcccggcagcgcctcaagggggctgggacgtaacggcaaaagctttgcaatcggtaatagagcggaagcaaatattaggccggtccgtaaagatcgtctataaacccggcggaggcggagacagcggctggaaatatgtaaacgaacgaaaaacggatgtcatcagtatgaattcaagcctgctgttaagcaatgaaattttgggacaaagccggctgaaggcagctgattttacgcctttggccattatcgcaaaagagtggcagaccgtcgctcttccgaaggattcaaagataaaaagcggaaagcggctgctcggcgatattaaagcacatccgggcggcataaaaatcggatttgcgcccggcctcggaaatgatgaccagctctcctttgcgagagcggcggaaatggccggaatttctccgtttgatatccgcttttttcaatacgggagcagcaatgaagtcattgaagctcttatcagccacgagatagacgccgcttcaatgaccatttcagaagcgagagacgcctatcggaaagggaaaatcacattggcggccgttacgtcggacaaaaggctctccggcttcagcgatgtgccgacatggaaagagcagggggtgccgtttgtctttgcgcactggagaggcatcatggggccgaaagacatgaccgaaggcgagatcgcctattgggatcaggctttgaaacagattacctcatccgcggagtggaagcaaatgttgaaaaaacgggattgggagagcttttataaaaacagcagcggcgcaaaacgctttttagaagagcagaccgagttttataaagagatgatgagcagcgaaaaataagccttccgcatatttgcgggaggctttttatttataaatgaacaaaatgaacgaaaaggttataaaaaattaaaaatctttaaaatccaaaatatttacttcaatatccaattctcataagatagcaaaaaggcggataaaggggatcgggcctttaaaatgtaagcgtattcatgataagggggacatactgtgttagcaatcttaggctttcttatgatgcttgtttttatggtgctgattatgacaaaacggctttcagtgttaacggcgctcgtattaacgccgatcgtgtttgcgctgtttgccgggttttcttttaaccgggtcggcgagatgatgatttccgggattgaacaggtggcaccgattgcagtcatgattatgtttgcgattctttatttcggcattatgattgataccggtttatttgatccgatggtgtcgcgtattttaaagctggttaaaggcgacccgctcaaaattgtagtcggaacagccgttttgaccatgcttgtcgcactggacggagacggctcaacgacgtatatgattacgacaagcgcaatgctgcctttgtatatcatgctcggaatccgtccgattattttagcgggaatcgccggtgtcggcatgggcatcatgaacacgataccatggggcggcgcgacgccgcgtgcggcgagtgcgctcggcgttgacccggcagagctgacggggccgatgctgcctgtcattgccagcggaatggtgtgtatgattgtggtcgcttatgtactcggaaggatggaaaggaaacggctcggggtgatcgaattaaagcagccgtcccatacaaatgaaacggctgcggctgcggaagatgaatggaggcggccgaaactgtggtggttcaatttactgttaacgctttctttagtgggatttttagtgtcaggaaaagtgaatttaaccgtgctgttcatcattgcgttttgtatcgcgctgattgtcaactatccgaagcttaacgatcaaagggagcgtatttcagcccattcgagcaatgtgcttgcgatcggttcgatgatttttgccgcaggcgtgtttaccggaattttaacggggacgaagatggttgatgaaatggccatttccctcgtatcgcttattccggaacagatgggaggttttattccggcgattgttgccttaacgagcggtatctttacgtttctgatgcctaatgacgcctatttttacggcgtgctgcccattttatccgagaccgccgtggcgtacggtgtagataaggtggaaatcgcccgcgcttcgattatcggccagccgattcatatgttaagcccgctcgtgccgtcgacgcatttattagtcgggcttgccggggtcaccattgatgaacaccagaaatttgcgatgaaatgggcggttcttgccgttatcgtcatgacggcctttgcgctcatcatcggcgcaatcacgattttttaacataaaacacccggttcgtcgcacactaaaggcatcagaggaggtgccatgatgagtgatccgtttatgccgcttttttcagtgagaagcggcgccggttttaaagcggcggacggcgtttacggactgaccgtgcagattgcgaatgtttactttatcgaaaatccctcagctccgcgggaaatcattctggttgacgcgggaatgccgcaatcggcggagatgataacagaagaaatgaaacgccgattcaaagaggggtatcagctgaaggcggtcattttgacacacggtcattttgatcatgtcggtgcgattgaagagctgcttgagctttgggatgtgccggtttacattcatgaaaaggagctcccgtacgtcacggggaaagcggattatccgcctgccaggcccgatgcgaaaaaagggcttgtcgcaaagctgtcaccgctgtttccgcgccatacgatccgcattccgtccgttcaggcactgccttcagacggtaccgttccgtttcttgaagaatggaaatgggtgcatacgcccggtcacacccccggccatatttcattattccgggataaagaccgcgttctgcttgccggtgatgccgtgatcactgtggaacaggaatcgcttgcggacgttgtcattcaaaagcaagagcttcacgggccgcccgcctattttacagcggatacgcagacggcggccgcatccgttgagaaattggccgaactggagccggaagcgcttttgacgggtcacggaattccgatgacgggaaaaaactaccgtgaggatttgcttacactggctgaaaaactgcattccgttttgtaaaacacctgcgaacatcacaggtgttttttctttgcagtttccagtatgatacaaaaaaaccattgtgttcactcctaaaaacgatacaatgggaaacagatgtaaattgaaggagagagttttttgaaacatacggaaatactttgggatgaggcgaaggattttattgatgtctgctatcaggaactcggaatggaatcgcaaatcaacgcgcgtctgcacgcgataaaagatgagatagatcggacgggaagttacgtccatacggcggaagagcttgaacacggggcgaaaatggcgtggcgcaacagcaaccgctgtatcgggcgtctgttctggcaatcgctgaacgtcattgaccggcgcggtgtgaacacgaaagaagaggtgcgcgacgcattatttgaacatatcaaaatcgccacgaacggcggaaaaattaaaccgacgattacgattttccctcctgagaagaatggggaaaaacaagtggagatctggaatcaccagctcatccgctatgcgggatatgagactgaaaaaggaagagtcggtgatccggcatcatatgagctgacggctgtctgcgaaaaactcggctggcgcgggaagcggaccgattttgatattctgccgctgcttttccggatgaaaggggacgggcagccggtctggtatgacctgcctcagacgctcgtgaaagaagtgccgatcacccatccggatattgaagagtttgccgatttaaatctcagatggtacggggttccgattatcgccgatatgaggcttgaaatcggcgggctgtcgtacaacgcggcgccttttaacggatggtatatgggaaccgaaatcggcgcaaggaaccttgctgacgaaaaacggtatgatatgctcaaaaaagccgctgcggtcatggggatttccgccagcctgaataccgacctgtggaaagatcaggtgctggtggaactgaataaagcagtgctctattcatacaaaaaacacggtgtcagcattgtcgatcaccatacggcggcgaatcaatttaaacgctttgaagaacaggaacaagacgcgggcagaaagctgacgggcgactggacctggctgattccgccgatctcgccggcttccacccacattttccataaatcatatgacaatacgattgtgaagccgaattattattatcaggacaagccttatcagtaactgatggtaaaagtgcggtaccctttcagacggtgtgattcttcgatggttacgtctgtgacatttgagaaggggctgccttttctgactgcttcggcaaattgttttaacgactcttcaggaccttcggcaaggatttccacccggccgtcatcacggttttttacccagccggctaccttatgtctgtcggcttccatctggacgaagtagcgaaaacctacgccctgaacccggccgtctgcaatcatatgatattgaagcatggaaaaaccacctttttcttactatgataaaggaaagatatgagatttcgcaaaggatgtgaacgaggtgacgcaagactattctgtcttatctatcaatctcggaaagcccgcaattcatgaatttgccggcagacaaatcaattccggcatcataaagcggcccgcagattctcccgtcatgctgtataaaacccattttgacggggacgggcaagccgacttgaagcatcacggaggccccgataaagcggtgtgcgtgtatcccgccgagcattattcatattgggaaacaacgctcgcgagaaaacttcccgccgccgcgttcggggagaatgtaacggtcataggacttgccgaacaagacgtgtggatcggagacgtctttcagctgggggaagccgtcgttcaagtaagccagccgcgccagccctgcgtcaaacttgcgctcaaatatggcatcaaagatatggtgctccgtgtacagcagacgggatttaccggcttttatttcagggtgcttgaagaaggatatgtcgatccgcgtcccgtcctcaagcgtctgtcgagaggaaaagaaagcatttccgtctggtatgcgaatgaagtgaaatatcgtgattccggcaatctgtcagcgattgaagaaatactgcgggaagaagcgctgtcagaaagctggagggagtccttccttaaaaaaagagacaggctcactaatgtatagaaaaaagccgtgctgcactgacagcacggctgatttacgttatgcttgtttttttgtttccagcagattggcaaggaagtactttttgaagctttgaagctttcttccttcatagtgggtaattccttttttctttaactcttctacataccagcctttactgccataatgcatgtcagaaaactcctttctccgttctcccgctggggaggtttcttcagtttttgccaaacttttggcattgtaacatctataaaaagacgctgaaaagggataacgcaaaaactgagactttcgattcagagatgtaaagctttcttacatatatatgtaaagggcggtcttttcatgcttaatggccggttaattttaacagcaccgttccgagtgtcatgattccgaaaacgacgccgaaataaatcagcatccccttctttttcttcactccgtaaacggtgagaatgatgctttcaataaagaaaataaacccgaagataataaaccacatgttgaaaaatggctcctttcacagacatatgtccagtgtagcacaactcttataacggagcataaaaaagccgggcactgtatcagtgtccggcaagtttgacgagaagctgggccaaatgctgtttttcattgtcatccgcaatgtcccacagttcttgtaagagtttttcttccgcattgcggggctcctcgtgtttggcgagatagtccccgaggatggcggcgcttttgatgattttgctgtcatccagacccagtttttttccggcggaaattttctgatgaaggtacgccttaaattcctcgaaatcctctaaaatctgctgtttcgttacgccgtgcatggcgtgtatttcgttttcgattttgattttttctttatcttttttcatgcgtctccctccttcgggttagttgttgtatacctgtttggaagggagatgaaacattacaatgcagttaaaataatcggtttatcttttgtgatcacgatggtgtgttccacttgggcgacaaggcttttatccggcgttttaaacgtccagccgtctcccgcttcaacaatcgtttccgctttcgtggaaataaacggctcaagcgcgatcacggttccgtttttaaacagcgcgttatcaaacggatcgtagtaattcatgatgtggttcggcgcttcgtggaggtttctgccgatcccgtggcccgtcagcgttttaatgacggtaaatccgttggagcgggcttcatggtagacggctctgccgatctggttttggcgtttgccggcttttgcctgatccaatcctttctgaaatgcggatgctgcgcagttacaaagcttttgcagacgttcatcgccttctccgagcacaaatgaaattcccgtatcggaataaaaaccgccgaactccgccgaaatatcgatatttacaagatctccggcttttaagattttagaggcgctcggaatgccgtgagcgacttcgtcatttacgctgatgcatgtcacgcccgggaaatcgtattccttctccggagcggaagcggctccgtgctcgtcaagcaccgcctttccgatcaggtcaagatctttcgtgctcatgccgggctcggcttttttcttcatttcttcacgcgccagcgcgacgattctgccgatttttttaaggccttctaattcttgatcgttcgttacaatcattgtcattcccgctttctatttttaatcatctgattcaagcttaccacaactggtttataaatagaaaaccaacaagccttatgtgaataaatgaaggaaaattggtatagatcactagataacttatgtggtatatttaagaaaaaagaagggggatgggtaaaatgcttcaatttttgcaaaaactcggaaaatcatttatgcttccgattgccgttctgcccgccgttggtattattttggccatcggcagagaggacttattaaatattccgttcatttacgcggcggggaccgcggtatttgatcatctgccgctgattttcgcgatcggaatcgcgattgggatttcgaaagacagcaacggggccgccgctctgtcgggagcaatttcttatatcatgctggacgctgctgtaaaatcaatcaattcgacaaataatatggccgttttcggagggattatcgcggggttaattgcgggatacacgtataatcgctttaaggatacgaagctgcccgaatatctcgggtttttcagcgggcgcaggctcgttccgattgtaacggcgctgattaccattattttggcggggatcttcggatttgtgtggccgccgattcagtcggtgattacgtctttcggggaatggatgatcgggcttggcggaatcggcgccgggatttacgggatttttaaccggcttttgattccgttcggtcttcatcatgtgctgaataatattttttggttccagtttggcgattttcacggaaaaacgggagatctggcccgcttctttgcgaaggatccgacggcgggaacttatatgacgggattcttcccgattatgatgttcgggcttcctgccgcatgtctggcaatgattgccgcggctaagccaagtaagcgcaaagcgacggccggaatgatgatcggtctcgcgctgacggcatttattaccggaattacagagccgattgaatttgcatttatgtttttatcaccgcttttgtacggggttcatgctatattaaccgggttctctttatttatcgtgaatgttctcggaatcaggtcaggtttttcattctcggcgggggcgatcgattatctcctcagctacggcattgccgaaaaaccgcttttgctgctcgttgtcgggctttgttatgcagtgatctattttgtcgtcttctatatgctcatcaaaacgttaaacttgaaaacgccgggacgggaagatgatgagggagaggaagaagtgcttagtgaagatacggccggttccgtcgaagaacatgccatgctcaaggggctcggcggcaggcaaaacctcgaaacgattgatcactgtgcgacccgcctcaggctgaccgtgcaggatacgtctctcattaatgaggcggcgcttaaaaaagcgggagcaaaaggggttatcaaaacggggaataaaacggcgcaggtcattatcgggccgaacgtcgaatttgtcgcggaagagctgagagaagccgtccgccgtgacgaccagaagcagacttgaaaaatccggatcacctaggtgatccggattttttttgaacatatatcaagtttcacataatgtacaaaaaacaacgttttcttctatgttaagattcatgtagaacaagtatggagatgatgtaaggtgacatggattgcagttgtttcaattgttgtcataagcctgattaagattgtgctgacatgccttcctaccggagcggtggaatggatcctccgcaagtttgaaacccattcaaagctcagtgacgcgtccgctgccgtttccctcggcggaaaacgtctggaaggcgaagacaaacgccgggtgattgatgattttaacgaagccgtgtttatcgaacggcattatatatacccaggggatgaagagcgttatcttcatccgcaaaacggagccgatccgcttgtcattaagacgagaaaaggaaaaaaagatgtgacggtgtttgtatacagctacgaagatcatgtagatgtcgtcaaacagcagaaaaagaaagtcgtcgcttattcagttctttccggcagcctgcaaaagcgctctctggccgccgccgggagctgaacataaaaaagccagatcattgatatgatctggcttttgtttattctttttgatcatctgctgaggaatcttcacgcttcgtataatcgaattgtgaagggtccactttcttaaagcctttcggctgatagaaacgaagcagatcgccgttgatgatcttatcagacatttcaagctcagtcttgacgagagagtcttcttttttgtcgacttctgaatcatctaagagtcttccggttttcgtatcgtaatacttgccggacactttcgtatagttcggtgagatgaagtctccgttacggaacggaatgacttctctgtgctctttcgataagatatctgaacctgacatgagataatctttcgtatcgacgccgagcagatgaagaacggtcggcgcgacatcgacttcaccggcaaatttgtgattacggccgcctttcacgccgggagcgtggataaagagcggcacccgctgaagctgggcattgtcgtattcagtgatctcatctttgccgagcactttcgccatcgctttattatggttttcggagatgccgtagtggtctccgtacatcacgataatcgacttatcgtacaggccgtcttttttcaggtcatgaaagaactgttcaattgattcatccagatagttcgcggactggaagtagttattgacgactgaatcgccaaagtctcccgccgggaagtccgtgtcttctttatccattccgaacgggaagtggttggacagcgtaatgaacttcgtatagaacggctgcggcaggctctttaagagcggcatggattctttgaaatacggtttgtctttcatgccgtagtttttcgtgttttcttcgctcatgtcataataagcggaatcgaaaaacttatcgatgccttccgctttgtacatttcgttacggttccagaaagtctgcgtatttccgtggaaagcggcagacgtgtactttttgccttttaggatcgcaggaacggactgcagcgtgttttgtgctttattgacgaaaacagaaccttgcgaaagcgggtacagagagttctccatcataaattccgcatcagatgttttaccttgtcccgtttggtggaaaaagttatcaaagtagaatgtttgattatcgtgcgccagcttatttaaaaacggcgtcacttccttgccgttaattttatagtcaatgataaaggattgcagagactctaatgagacgtagatgacgttttttccttcggcttttccgaagtagacgttattcggcacgtcatagttggccttcatatagttttccacatccgttacatcgcttgaatcggcaagcgcgcgctggctgtttgatttcacattctgcacggcatcgtaaatcgtaaagttgtacgtgcccaagtatttcaccagatagttacggtcaaatgagcgtgtcaaaagctcaggacggtcggattccgcgacggcgaggttgatcaggaacataagcacggcggaagccaaaacgattctgaatgatttcttcgccggtttttcagccggttttttcatcttaagggccaaaataatcaaaatgacggtatccaggaagtagaaggcgtctgtccatctcattaacgagaacgcgctgtctccgagctggccgccgtttgtctttgcctgcatcatgaccgggatggtaatgaaatcattaaagaatctataatagacgatgtttgcaaaaagcaaaaaagacaataaaaaatgaatcacaataatggctgtctgctgtaattttttcttgaaaagaagcccaaatccaagaaagaacaagctggagctcagcggattcacaaaaagcaatattttctggatcgtgttgtctatgccgaggttaaagtttaaaatataagcgacatatgttttcacccacaataacacgaccgctatcaagaagaaggcaagtcctctttcttttataaatgttttcattgttacactccttttttccgatcacggtttacacggaacgatagaaaaaacgaacgtaatcaatataccatgaaaccagcaaatagaaaaggtggaaaaggctcatcggaaaaagggcgaaaaacgctgtcgcaacggcggttgatctgttgaatgacagctttaaaaaacacaaatggaacaaactgggatttgtgtttccgtatgatcacacccggttctattgaaaaaagaggtgaacagtaatggatattgcccatatcgtggctgaagataaaatcaagcgcgccattaaggatggagagttcgccggcatcaaaggaatgggaaagcccctgccgaaagacgatgccgcacatcttccggagtcgctcagaatgggctaccgcatattaaaaaacgccgggatcgccgaggatgagggcgcgctgaagaaagagctgatgacgctcgattatttgatcgccaagtgccgcaatgaacaggagcgggatcacctgcggaacaaacggacggaaaaacaagtcagactcgacaaactgacggaggagaaagccatgttctcaaaacccgcatcttctcattataaggagaaagtgtacagacggctgggccgcccgtaagccggctctttagatttttttctgaaaaggaatgtgctccataaggcgcgggcaggaaatgtggagcaggccgtttacgcactgcgcctgtaacaggtggggatcagccggttcaggaagctcaatcgtctcatcgatttccccgtaataccggttttggcagacgcccatgttctttggaaaaaggggtgtgatgtttcctcttatatgcagccgtgttcttgacagcagcctcaatgtcaattcttcttcgtaaacgccgggcatttccacaatgacgaatgtgtgctgttcatcctgataaatatcataagtcagggtgtttttttgtaaggagaaaaaatcttcgggagatttccgtttcaggacattggtccaaaagtcgctgggcttgtgctcgttcgtaatctcaagccactttctcattttttcgatatccacttcggcagaacctccctatatttgatttgcgatcggcattgacgggttggcgatctgatcctgatcgctcacgtcagggtcaagatggcccgaattcaaacatccggcggccggcgaaaaatcccctaaagaaaagttcgcgccgacaaatttgctgttggcggtgtggctgttttgtacggtctgaccgatatcgacgtttccgttttgcgttgctccgtttacttttatattgacgacgttaatttggtaaggcattcataaaaacccctttaatctataatgggcggcaccggcgtaatatttgcggtatctgcggttccgatggctgtctggtcgttgacatcaggatcatttaacaagttctccatcatcgattctataggtgacgtatcgccgaatgaagagttcagtccttgtgatttgttatttgtggtgggactgttgtatgccgcttccccaatcgtaatagatccgttgccagaaatactgttaatcttcaaatagtacaggttgataacagtggatggcatctcttcacacctctttaacttagttgtacagtactgtatgctttttgtgctcctgttgtgaattccgcccggacatgttcccgataaacaagaagtcaaggcccggttccggcggggctttttttgtttcagggtctttcgcagtatatttgtgatgaaagcgctataaaaatagattgacgacatgtatatacatcattacaatagagtcataaacatgtatatacaagtttgtgagacaaaatgaaaacggttacggaggggatggcatgggtgagtttaaccgggctgcgcggcagatcgctgaagctgtcggcggaatcgaaaatattgaggcggcgactcattgtgtgacgcgtttgcggtttgcattaatagatgaaaccaaagtaaaccaaaaaatgcttgatgcaatagacattgtcaaaggatcttttgcggtaaacgggcagtttcaagtcgtgatcgggcaggggacggtcaacaaagtatatgcggaattagtgaaggaaacggggatgggtgaagcgtccaaggatgacgtgaagaaggcggcggcgcaaaacatgaatcctttacagcgtgctgtgaaaacgcttgcggacatctttattccgatcttgccggcgatcgtcacggccgggctgttaatgggtctgaacaatatattaacggcggaaggcattttctacagcgccaaatcgattgtccaagtgtatccgcaatgggcggatctcgccaatatgattaatctgatcgcggggacggccttcgcttttctgccggctttaatcggctggtcggcagtgaagcggttcggaggaagcccgctcttgggtatcgtgctcgggctgatgttggtgcatcctgatctgttaaacgcatggggctacggggctgccgagcagagcggcgatattccggtgtggaacctgttcggccttgaggtgcagaaagtcggatatcaaggtcaggtgctcccgatcctgctggcgtcttatttacttgccaggcttgagctctttttgacgaaacggacgccggagggcattcagctgttggtcgtcgcgccggtgacgcttttggtcatcggttttctatcctttgtcatcatcggtccgattacctttgcgatcggtaacgcgctgacggcgggattgattgccgttttcggacaattctccgccatcggaggcctgctgtacggagggctgtattcggcgcttgtgatcacggggatgcaccatacgtttctcgcggtcgatcttcaattaatcggatcaaagctcggcggcacatttttatggccgatgctcgcattgtcaaatatcgctcaaggatcggcggctttggccatgatgctgattacaaaagataaaaaacagcgggggctttcactgacggccggcatttccgcatatttgggcattaccgaaccggcgattttcggcgtgaatctgcgttacaaatttccgtttgtgatcgccatgatcagttcgggaatcgcggggatgttcatctccgtcaaaggcgttctcgcaagctcggtcggagtcggcggcgtgccggggatcttctccattatgagccggtactggggtccgtttgcgatcggaatgctgatcgtgctgattctcccgtttgcgggaacatacgggtatgcgcggctgaaacggcaaaaatagaaaacctgcggggcgccttctatcaggctgtcccttttccctttcaattcaaaacattacaggcggtgaagaaaaatgaaaacagacagcacaccatggtggaaaaaggcagcggtatatcaaatttatccgaagagctttaatgatacgacgggaaacgggatcggtgatctgaacggtattatcgagaagcttgattatttgcagaagcttttgattgatgtcatttggcttacgccgatttacgattcgccgcagaatgacaacggttatgacattcgcgattactgcaccgtttatgaagagtacggaacgatggaggattttgaacgccttctcgatgaagcgcacaaaagaggaatcaaggtcgttatggatcttgtcgtcaaccatacatcagtcgagcatcggtggttcaaagaagcggtctcgtcacccgacagtccgtatcgggatttttacatttggaaagacggaaaggaagacggccgggcgccgaacaactgggaatcaaaattcggcggttccgcttgggagctcgacccggcgtcaggccagcactatctgcatttatttgatgtgtcgcaggccgatttgaactgggaaaatgaagagatgagaaaagaggtttacgacatgatgcatttttggttccgaaaaggaatcgacggtttccggctggatgtgatcaacctcatttctaaagaccaatcgtttcctgatgccgaggatgggcgtgacgggcgcccttattatacggacgggccgcgcgtgcacgaatttctccatgagatgaaccgggaagtgttttcgaaatatgacagcatgacggtcggtgaaatgtcctcgacaacggctgaccactgcatccggtacacaaaccctgagaataaagaactcgatatgacttttaactttcaccatttaaaagtggattatccgaatggtgaaaaatgggcgctcgctccgtttgattttctgaagctgaaacggattttagcgttttggcagacggagatgcaaaaaggcggaggctggaacgcattattctggtgcaaccatgaccagccgcgggccgtatccagatacggagacgacggcgtataccggacgaaatcagccaaaatgctggcggcggccattcatatgatgcagggcacgccttacatttatcaaggtgaagagatcggcatgggcaatccgaaattcgatgacatcggctcataccgcgatgtcgaatcattgaatatttacaaaaagatgaaggaagaaggcgtgcccgaaaaagacattatcgccattttaaaagagaaatcaagagacaatgcaagaacccccattcagtggaacagcgggccgcacggcggtttcacgacgggcacgccttggattccggcggcggatgattatcgggacgttaacgcggaagcggctttgcgggacccggattcaattttctaccattatcagaagctcatcatgctcagaaaggaatatgacatcgtgactgaaggaacgtttgagctgcttgctgaagacgatccggcggttctggcgtacgtcagacacggcaaggatgaaaaactgctgtgcatcaacaacttctacgggaaagaagcggactttacggttccgtttaaagacacggacggctggcggtttacggtgctgctgacgaatgatgaaccgagggaagggcggccggaacgattgacgctccgtccgtatgaatcgatcgtttatcatctgacaaaagcgtgatacactaatctgggtggtcaaatgaaagtgaataaatacatcacaatctataaagatatggtgcggcagatcgaaagcggccagcggcaggctgaagacgttcttccgtctgaaaatgatttgtgcgatcaatacggcacatcacgagaaaccgtccgcaaagcgctcaatatgctggcgcaaaacggctacatccagaaaatcaaaggcaaaggctccgtcatattagacagagaaaaaatgcgttttcccgtctcaggcctgatcagcttcaaagagctttcggaaacgctcggaaaagagacgagaacgacggttcaccgtctcgggctgatcctgcctccctcagaagccgcaaaagagcttggtacagaagcggatgaaaaggtgtgggaagtcgtcagatcaagacggattgacggagaacatattattttggacaaggattactttgtgaaaaaacatgtgcctctattgacgaaggcgatttgtgaagattcgatctatgagtatctcgaaggagaacttggcctctccatcagctacgcgcaaaaggaaattgtcgtggagccggcgggggaggaggaccggaagtatttggatctaggcgggttcagccatatggcggtcgtgaaaaaccgcgtctttttggaggataccagcctctttcagtacacggaaagccggcacaggctcgataaattccgtttcgtcgactttgcgagaagagaaaaataaaaacggactgccgcggcagcccgtttttttgtcagtatcaaaatgaatactatcccacaaaaatgtgcgtactggtactttcaaaaataatggctacaatagtacataacgattgaaaaggagagatcatgaatgtcagataaaaaacagcagatcatcgaagcgtatcaattcagacacgccacaaaggaatttgatcctgagaaaaaaatttcagaaagcgattttgaattcattttagaaacgggaagattatccccaagctcactcggtttggagccttggaaatttgtcgtcgttcaaaatccggagcttcgtgaaaaactccgcgagttcacatggggcgcgcaaaagcagctgccgaccgcaagccatttcgtacttctgcttgcccggacggcaaaggatatccgttttgacgccgactatgtcaaaaaccacttgcgggaagtcaaaaaaatgccggaagatatgtatgaaggctatatcagcaaaacggaagactttcagaaaaatgatttcaatctgcttgaatcagatcgcgcgctgtttgactgggcatccaaacagacatacatcgctctcggcaatatgatgacagccgctgcgcagatcggaatcgactcctgccctgtagaaggcttcaactacaaagaaattcaccggattcttgaagaagaagggcttctggaaaacggaagtttcgacatctctgttatggccgcattcggctaccgtgtcagagaaccgcgcccgaaaacaagatctgcctcaaaagacgttgtaaagtgggtataagataaaaaaagctgccgggcgtgtcccggcagcttttaacgtttatttggttttgctaaaaaacaggcggtgatccaggacgtaacgggaatgatgatgccgatcccgattccggcacaaagaatggtgacggcttccgcactgaatacttttgagttcactattttttcagctgagtatgataagtctttaaaccagataattaaagccaaatagctgccgaaaaaagcaaagaataacgtattcgtattcgttcctaaaatatctctcccgatgcttaatccgaatgtgtacagatcttttctgctcatggacggattatgactgtaaatttcccgcatgggtgaagtaatggaaatcgcgacatcggtaatcgcccctatcgtgcccatgatgatcatggctgcggtaaccttcacaaaatccaccccgacaaacagtgtgaatatgccgatatcacccaattcttcttcaccgaatccctgaatcgaagtatgttttgttacagacataataaaaaacagcagcagtacaatcgtcagcattgcggaaataaaggcggttacggttttgacgtttcctccattaatataaaaaagagtaatgctgcaaatcacggcggaagagagcaatgttaaaacaatcggattgatatgcgggtctgtcatgaaaatgatggtgagaaagagaacaccgaaatttaagaataacgcaataaaagacctcgctcctttttttccgccgatgatgaccatcaatagaaataaaatcgccgcgagaattacgatgacattcatgagcttgccttctttcgtttaataaaaaagatagaagcatacagactggcgggtatggctaatacgattccgatccctccggccaatgctctggctatttccaaggaaatgttcatagaaagagtgaatcctatcggggaatcatttttcaaatacaacagcatcatcggaatagagccgcttatataagcaaaaaacagaatgttggtcatcgcccccatgatgtcttttccgatctccatcccggaacgtctgagagcttgtaatgagatacccttgttttcttcatataatccgaagacagatgacgtcatggtaatggctacatccatgaccgctcccagtgatccgataaataccccggccatgaacaccgtgtgataagggcgggttaaatactgcatttcctcatatctgagacctttctcaccggttgccagcatcaccagatacgtaatcagcagggaaacgaaagtgcctgcgagcgtcgcggcaatggctgcgtatgttttcgcgtgaaaaccgctgacaagcagcaatgagatgacagtaaagatgagaatacagataccgcagatgaaaattaaccctatattaggatgcttcctgtacaaatctaatgcaaacgacagtaaaacggcgttaaacatcaggctgacgatcgaaaagaagccttgttttttgccgacgataagcaaggtgaagatgaaaacccaagcgatcagcaaaagctgcttatcccgttttttatctataatgcttcccgatatatccttgtttgatggtttccctttatcaatagaaacgaatacttcatcgccaatcgaatatttctgatcattcgctccggatgatgaatactgattggacaaatgaatgagctgtcctttctgactgccgttttcaagtctggcagtgatcgtctgattgaaaatcttatctttgtttttatgcatgtcctgtacgtcagactgatgttccaatgttgttttcgtcactttggcaatcggccgctcataaaaagaagcgttgtgagtgacgaaaatgagcgagctgataaaacagagcgctgttatcacgtaaaacagctttttcttgtaagacatgcggtttcgtttgtgtcctgttatcttcaaaaaaagtcctccaaacaggcggcgccgtatgaaagagaggccctgccgtgaagtgttaaacgatgcggatgcagtctttcgcgaataacgttcatattttatcactcggccgtacggctgtcgactcagagggggaccgagagaaaaagctcccctgaaatcagatcaggagagcttttgggatgaaccgcccgataaaagcggtctttttatgcttcgttcactttttttgcttttcttctttgatgcagatacagtgccgttccgagcgcgctgatgagaaacccggcaagaaggatggaatacatcgttgtggccgtatcaggaagcaggccgcccggcgatactccgtcctgtgcagggccggatgacggtttttgtccgcttggctgctttccggagccgtggtctccgcttgtcggcggcgcgctcttcgtgtttgcgtttaatatggtgtattcactgaaatgatttgtatagcccgtgacgagatcgtgtgaaaccgaaccgttgtctgtttttgtatagacgttctttttccggtctacatggtaaatgcccggctgtttcgcctttttcgtattctcaatgcgcagggtgagctttaccggcgctttgaatgttttgatgtctttgtttttctgcttcattgtaaagtcgtatacatttgaaagcgccccgcttacttttcctttcggcgtcacgccgaatcgtgtatcagctgaagcagcgtttgccatcggcattttcatgctgaacttgtcatgcaggatcgtaagggaagaatccgatgttctgtcctttaacaggccgatttgttttttggtcacgctgagatcaatcggctttttggcgccgtcattcttatcgtaatacacgatcggcgtgttggcgtttttggcataaacggcaaatgcgctgtcatcttcaagcgtccacgaaccgtttttttgtttcgtcggcagatacacttcctgcgcgcggccgtcaactttcggttccaccgcttttcccgctttttcaagctgctcggtgaagacctcatagtcgacaaagccaaggtcttctttatgggacgcttcgttaaagacggaatatccgtctccgccttcaccgacaaagttactggtggcgactctgtatgtcttcttatcagaaatcggctttacgctgccgtcatcctgtacggccgcagcttgaagaacgcggtgtcccggctttttattcagtgtaaacgtgtatgttaaaccggcaacttgagggaaggcgccgccttgagcctcaattccgcttaacccttgctccaaggcttgtttgatctgttttccggttaaatccgcgacgtaaagcgtgttgccgaacggcatcacattcagcacatcgccgagtgtgatgtctcctttatcaatgcccgcgcggatgccgcccccgtttgtgatcgcgatttgggcgccggccgcttccttcgctttttgcagcatgccgtccgcgatgaagtttccgagattggtttctttggagcggacatgctcgcgctggccgtcaagtgcgacctttgttgagccgactttttcatttttgacggagacgagctcttttttaaacggatcaagctcttttttcagatccgggtcttctttcgtctgctcgttcactggcagcgcctgaagagaggattgttccggcaggacgatgccgtttttgtcaaatgcgacatcgacacggcctaaatattcgccatattcttttgcctgggcgacgatggtcggctcttcgtttttgacaacttccattttatctacaagcgtatgcgtatgtccgccgacgatcaagtcgatgccttttacctttttggcaagatcgagatcacgctgatgcccgatatgggtcagggcgataattttattgacatgttcattattctgtatttcttttactgtatcttgtgcggattggaaggcatcatgaaagacaatgctttttcccgggcttgatgtgacggacgtatcttctgtcgttaagccgaatacggcgactttttctccgtttacatcaagcagaatgtatggatagatgcctgcttttttctttttccctgccgtaaatgtgtctgcttttttcatgaatggtctgagttttgactctttggacacatcgacatttgagctgacgagcggaaagtcaggcgcttgaaaattgtattttccggacgggtcagccgcgcttccgttcccgctcaggaagctggcgagagcacccgggcctttatcaaactcatgatttccgaaagtcattgcgtcgtaacccatgctgttcatcaattttaaatcagccagcccctgccactttgtgaaatagagatcgcctgagaaaacgtctcccgcatccagcaaaatgctgcggtcggtttcgcttctgatttctttgattttcgtcatccgtctcgccgcgttatcaaggtgggcgtgcgtgtcgtttgtatgcataacggtgagtttccatgcgtcatctttcggcggatctgtgcccggttcatcatctttgaattggagcttgtactgtccgtagcccgcgttttgtgattcaccgatataggcgacgtcatctgcgcggtcggcaaacggctttgcggccaaggaagattcaaatgtcatgtttgcccctttgaccggaaggatggaccagttatgatcagcctgcggattaatcgttttctgctggatgatgtaatccattaagacctgcctgttctcatcggcagaagagtatacgattttatcattgcttaagtgagggaatcccccgccgcctgaagcgcggtaattatttgtgacgatcagaaattcctgcttggcgctgacgggctttccttgataagaaaggttgacgatccggcttgcatcgggatgaatgactgttccgttttcgttgtatttcgccggttttgtgacatcgacctgataggtgacaccgtcaatgacatcaaaattgtatgagcggtaggcgtcatttaaaagcgcttggctgccgccttttgcctgatcgatctgattaaattgccctgcggacatttcgagccagtccttcacttcgcttccgttcagcttgacgatctgaaccgtgttgtcatacaggtacaaatcgccgatatttttgatggcgaggtcgccagcggaaatgtttgtatagtagtttgagccgttccgcccgccggctttaaacggggcgcccgccgagaggataggcagatctttgtattccgtatccttcatcttattttcggcgtaccatttttgcgcatccgttacgatttgaatggacggatcatctttgacttgggcgaagaaactgttgatatcggcttttgtctggccgacgggttctctgatgtatttcaatgtgccttcgtgcgcttttttgacggtattgacgacggtttcgttttccgacgtcacattgccggcaatcggctcgatgctgccttttgcatcttccacatgccacgcgctgtctgttttttcaagccggaggtcgatgacgcccgcatatttgccccagctgcttgacatgacaacggggatgccgttaatcgtgcctttatcgacgtcaaattgatcagcgcctttgtattcggcatcagggaaaagcccgtgctgatggccggatacgatcgcatcaattccgctgactttcgttgccaggtcaaaaacggcgttttccgctccggaagactgcgcttttttttcgatgccgctgtgggcgagggcgatgacgatatcggctccttcagctttcattttcggaacggttttctttgcggattccacaatgtcttcgacctgaacgcggccttcgagatttttattatcccacgtcatgatttggggaggaacaaagccgatgtagccgacttttatctgatgcttgccgccgttttcatccgtgacggttttgtcttttatgacataaggcgtataacggttttcgccgcttaatgttttcacattggcgttaacgatcggataatcagcgcctttgattgtcccgtccagaaattcaagcccgtaattaaattcatgattgccgagtgttcctgcgtcataatgcagactgttcatcacttcaatgatcggatgggtctttgcgcctgaaataatatcatttttctcatattttacggcgtattctccgaggggattcccctgaatcaggtctccgttatcgacaagcagcgtattcgggttttcgcgcctgtgcttctcaataagctgagccgttcgggccagcccgaattccgttgtcggtttgtcgctgtagtaatcgtagtccatcatgttagcgtgaacgtcagttgtggctaaaatgctgagattcacactggaggatttgttttcttctgctttaatgggtgatgttgggaggattagactaagtatcataactaggggcagcagaatacggagtgtcatattgacgctgcatcgtcttttctgtattctcacctgttctccacctttcaacaaattttgtcatgcagtaccattgtaagaatatttcgtgaaagttcatatagatttcatgatgattcttgtaaaaagatgaaaaatgaggataatgacctatgtaaaacggatgagcggcaaacgcgttacctatgtttgatgttagtgtggctggggtacatggatttatgtagacttcatcaagcaggaggtagtaactatgggtaaaaaaattgcagttgtattaacggattattttgaggatgtcgagtatactgaacctgcgaaagcttttaaagatgcaggtcatgaattaaccgtaattgaacaggaaaaaggaaaaacagtcaaaggcaaacaaggggaagcggaagtgaaagtagacgcgtccatcgatgatgtgaatccgaaagactttgacgcattgctgatcccgggcggattctcgcctgatatgctgcgtgcggatgatcgtttcgtccaatttgccaaagcgtttatggatgacaaaaaaccggtgttcgccatttgccacggacctcagcttctcattaacgcgaaagcattggacgggcgcaaagcgacagggtttacatcaatccgaatcgacatggaaaacgcgggcgcgaatgttgtggatgaagaagtcgtcgtctgccagaaccagctggtcacaagccgcacaccggatgacataccggcattcaaccgcgaatcattaaaactgcttgcgtaatataaaagcggagcgccgtatcaggcgttccgctttttttgtgaagattcccggatgaccagctcaggcgccagaataatgcgttgttttttgtgctgggaactggtgattttatgatgcagcaattgagccgcttcttttcccgactgccgcggaaaggaagaaacggttgtaagcgggggataagaaatttcagcttccggcacgttatcaaagccgacaatgtcaatatctttgcccggaatgagcccggcttttctgatcccttgcatgacgccgaacgcgaccaaatcactgaagcagaaaatcgcggtcgggcgctcagaccggcggaggagctccgtcgcggcttcacagcctgcttcgcgggtcggcgcgctgtcaatgacatagtcattttttacttccagatccgcttcacagagcgcttttttaaaccctttcatgcgcttcgtccatgttgatgagtgcttcacgccgcccagaaacgcaatctcctgatggcctttctcaatgaaatgacgcactgccttataggtgccttcctcataatctgctccgacaaaatcacagtcggcatcggcaatctccctgacggcgagcacgaccggaatgtcaagctgctcaaggcgggaaagggtttcctcagccgtacctgaaaccggacacaaaatcaatccgccgaccctgtgctccagcatggtcgagatcagctgctcctgcttcgcgacggaatcaaatgtcgtgcctaacagcaccgttaatccgacttcctcaagcgtattctgaacgccgatcagaaactctgagaaaaacgtattggaaatgtcagtaataatcaatcctaccgttgtggacgtctgtgatcgcaaattcgcggcgacccgatcatatacgtaccccagctcccgcatggattgcagcactttctcacgggtcgcttcggaaattcgcgggttattgcggacgattaatgaagcggtggatgttgagacgccggcatgttcagcgacctgctgcaatgtcacccggcgttttttttgctgtttcatacgtcgcattcctcacttggttttattcgttacatccattataagcgttttggcggctgagaagaaagagagaggggagaaaatgataaagcgccggaagacggattgtccttcggcgcttctgtcacaataggttattcaaacatttgctctttaatatactgaaccggcatttcacggcctgtccaatattcaaacgccatggcgccctgccaaagcatcatgccgaggccgttaatggtgttgcagccggccgcttgagcttgttcaagcaatttcgacgtaacggggttgtaaacgacgtctgtcacaatcaaatcaggacggagcatggatgtatcttcaatgacgctcaagccttcaagcggtttcatgccgacacctgttccgtttgtgaaaatatcgcttgaagcgatttcagcacgcagcgcatcttgatcttcgagcgggaagactttcgctttgcaagaagatcccttcatttcttcattgatgatgcggacgttttcttccgctttttcgaaaaacgcgtcattgcgggcgaaaatagagatttctccgaggccttccaatgcggattgaatcgctatcggagtggcggccccgccggaaccgaccagcgtcatttttttgcctgtgatatcgatgccgtgttcttttaagttgcggacgtatcccataccgtcagtggagtgtccgatcagtctgccgttttcattaacgactgtattcaccgcgccggtgaatttcgctgaatccgcgagttcatcgaggtaagggagaatgttcatcttgttcggcatcgagacattgaagcctctgacgtttaaggcgcgcattcccgttaccacatcttccagctgttcattgccgacttcaaacgcgaggtacgcgtagttcaatcctaattttttaaacgccaggttgtgcatcgccggagataaagagtgtccgatcggtgtcgcgaataatccgataagctgagtttttccgttaatccgtcctaaatctttcttcatgatgtattcctccgttagtccattcatttgtttttcatcccgctttaagggcagaaaaacgctgattacatatgtttatttaaaatgctgagtacgctgcgcaattcttcaacgggaatttgtccgggcgctgatgcttctttgcccgctccgaacgtgcacgctgagccgaagacttcgccggccaggcggctgatcagacctgttcccgccattgacatcgtgatgatcggccggtctgcgtattgtgttttcatcgtgtgagtggcatccaataagacgaaaacatcttcagtgctttgcggcatcaccgcgattttcggaatgtgcgcgccgtacgcctgcatgttccgcagccgggaaatgatttcttcttttttcggtgtctgatgaaaatcatgattggacatgacgacatatacgccgttgtcttcagcggttttcacaattgatttgacttccgcttctcccgtaaacaactcaacgtctgcaaggtcaatgtgttttgtttcgatggcggttttaagcaattcaatgtaaaagcggtcatcaataactttatttccgccttctttatgagttctgaatgtgaaaagcagcggtgttgcgcctgcggctttccgcagcttttcaagcatgccttttacggcgtccaggctgtcaacgtgctcgtacacatccgcccgccactcaatgatatccgggcgaagtctgttgacggcttcaatttcttcgagcagttctttctctccggccgccatcagcggcacaatgatcttcggaagcccttcgccgatgaccgtgtttctgatcgtgatagattgcatgataaatcctctcccttaaaaaatagtcaggctttcatcacttgcttaaagcggattccgataaacaatgcgagaagggcgctaacaaccgcaattccgatatcaagcagaaaaacaggcgtcaggccggccgctttggatatcgctcccgttacaagcggaatgacaataaaagataagcttgatgctatattaacaaaagatgtgatcgtacctttatttttagggaataaaacagccataaccgtcatcgccaattgcagaatgcccgcagttgaaagtccgatgacaaaggagctgatgactgatacggccggctgatgaatgaaaatcagagcaagcagcgcgattgccgcgatcacagggtacagcaccattaccgtaatcggctgaatcactctgtttaacagcacggccagcaataatacggacacaagcgcaccgatgctgtaatagctcaacaatttgacagcctgcacctcaggcatgcccaaaacggattgcccgaacttaggaagccatacttgaacgagcataaacagcgccgtagatgaaaagcctaacaaaatgatcgcaaggccttcgcgccatatcgacggctgtgatgtgaacgcgtcatcagacggagaggcttccgtccggccgccgtcttctttttgcttatgattcggaaacggaacttttaacaggaaaaagccgttcaggaagaaaataatgcccggtacgaaaaacgtccagccgtaaaacaaatgcctgtccgcaataaacgcgatgaaaaacggaagcaccgtcgcgccgatggatacaaacgctttgattaacacggttgcagagcttgcgtttttcggaaatccttcaataagcgccggatatgtcccggaatccaagaaggaattggcgatccctgcgaaaatggcgaagataaacgcggccgtatagtttgtcgaaagcggaattccgattaggaaaatcagatacagaaaggcgcccgacacgataaacggccgtctcccgaatgtatccgaaagcttcccggcaaacagaagcgaaatcagcttcccgatcccgatggcggagaccaaatagctgaccccggctgcggatgtatgaagctgttttgataatgcctccatattggatgcgataataatattgatcatgcccagcaggaaataattaatataaagacccgctgccattttggtgtatatgtttttcatgatgacatcccctaatgcggttaataaagaattaaattaatttttaaattaacaaaagcacagaaccattcccctttattgaaccactgcctttctttgaaaactggtttgataaaacggttgcagatacaaaacttgaataacgctgatatcacaacgagtatatcgttctactaaataaaaaaagataagcggcccgctcatttagtatatcgttctaccaagttcatagttactatactccttctttttatatgtgtcaaaccgatgaacttttattttttacttttttaaatcaaaaaaagacccgccgtttttcggcaggtctgacacgggtttattttctgagagaggcgagctcctcggcaatggcctgcatttcactcgggctgaatgatgcttttttcatgaccatttgatgaaggtatgtaagatcttctattttttcatcactgaaatcttccgctctgatgacgccgacattgagcatgttgagcttttgcgaaatgtcttcaatcattttgtttaacgtttctgtttgttggctcggcaaattcatgcatcctttcatgaccgttttcgtaccctttattctaacagaattcatttagaataaaagcttatttccacagcagcagaaaagttgctaagatgatgataaggtttttgatcctcaaaatgcggggaaagaatagggaggttatcgatatgatacatgtgctgtttgtctgtctgggaaatatttgccggtcgcctatggcagaggcggtattttctgatatggtgaagaaaaacgggctgaacgggcagattaacattgattcagcgggaatcggcgcctggcatgcgggaaatccgccgcatgaagggacaaaggagatcctaaagaagaaagggatcagcgtaagcggcatcacggcgaggcaggtgcgtgagtctgatctgaccgattttgattacgtcattgcgatggatgcagaaaatatcggacatctgcgcagcatggccggttataaaaaagcggcgccgcgtattgcaaggctgcttgattatgtaccggagtcggaccttgcggacgtgcccgatccgtattataccgggaatttcagcgaggtgtacgctttggtcgagtccgggtgccgtcatttgctggagacaataaagaaagaccatcatttataagggggattgaccgatgaagcagacacgcatcatggcaaaagcgattctgatcggcgctgccgccggcggagcactgtccttattacataagccgacgagagaggcatgtttccggaacatggacgcgtgcaggcggcgtgcggcattttatcgaaaacatcctgaagccctgaaacagcaggcttctgcaaaacttgatcaagtgaaaatcatcgccaataccgtatcggaagatctgagttttttaaacgggcagatcaccaagctgaagcagacgacgccgcaggtcattgacctgttaaaagaaacgaaggagcatttttcgaaaaacgatcattgaggtgggatgtcatgagttttataaaggagctgtttgcaaggttttctctccatgaaggacaaagtaaatcggcggagctggcgtattttttcctgctgtcattgtttccgttgatgattttcatgctgacgctcaccgcctatcttcccatatcggcagaagacgtgctcggggcggtcgatcaatacgcgcccgacagtgccatgtctatggtgaaatccataacggagcaaacgctgaacaagcgcagcggcgggcttttgtcattcgggattatcgccgtcatctggtcggcttcgaatggtatgaacgcgattgtcagagcatttaaccatgcctacgaagtcgaggaaaaccgctcatttatcatcattcgcctgacctcaatttttttaaccatcgcgatggtggttacgattttaatcgcattgcttctgccggtgttcggcagagaaatcggaatgcttgccgcagatttcatcggcgcctccggcctgtttttgcaggtgtggtcggttgtccgctggggtatcagtccgcttatccttttaatcgtgtttaccgcgctttacattttcgcgccgaataaaaggctttccctccgttttgtgctgccgggagccgtatttgcggcagcaggctggattatcgtcagtatgctgttctcattttacgtcggcacctttgccaactacagcgccacatacgggagcatcgggggaattatcgtccttatgatctggttttaccttacgggaacactgctgattttaggaggagaaatcaacgcgcttttacataaacgtaaaaagcttcctgatgaaaatccgtaccgcgggagcaagctatagaggaacggatgacgttcaagctgaaaaacggaggggaatcgattatgaccaagcatacgaaaaaaggcggaagccataataaacaaaactccaaaaacggcccgaagaataaaacaagcggaagcgctaacgggcagaacggataccactagaaagaagccgcctgacttagatcaggcggcttttttatgaggctggaaaagaatgggattcggatgcgggattgtgctttgttttcccgaagacgagcgcaagccaaatacagaccagaatcaccgtaataaagtaaaacaaattggcgctttcaaaccgctgcatataccagccgcccgccaccgggccgatcatgctgccgaggctgaaggaaatgccgcagagcagattgcccgccggcagcagatgggacggcagcaggtcgctcatatagctgatgccgagggaaaacatactgccgaccgccattcccgccgtaaaaaagcagcagccgatgacagaaggcgagggaaacagtccggccgtcaaaaagcaaagggcacccgttaataagatgacgagcaggacacgttttctcccgaatcgatcgcttaataaaccgagagggaactggaatacaatactcccgatggcaaaagcgggcaatatcagcgcgacggcatcgacggatatgcctaagcgcagggcgtacacgggaaagattccgttcagcgccgtttctaaaaaaccgtacccgaaagccgggagaaaagcgacccagccgaaaagaagggcgcggtaaaaccgttttgcgctgttatccccggatgtttcatccggaccttgcgccgggtactcgttacgtaagacaaatacaaacagccaggcggcaagactgatacagccggatacgataaacggaagggacggacttgttttcacaagagggaccatgaacgggccgacagcgaatccgagcccgaaggacagtccgtacagcgaaatgtttcttcctctgtttcggggcgttgactttgacgtcacccacgtttgggttgaaaaatgcagcatatgatccccgattccgataagcagccgaagaaaaaaccataaccatatggattgaagccaaataaaactgaataagctgatgataacaagaaatccgcccatgaccatcagaggtttgaatccgagcttgcgcagcggggcctccataaacggcgacgccagaagcacgccgatataaaggccggttgcgtgaagtccgtttatagcggctgattccccgttcgtttcaaaaatgacggagatcaccggcagaagcatgccttgagaaaatccggagatggaaacaagcagaaccaaaataaagaagtacagtcgtgacatcgcgtatttctccttcttcagtatctttcttgatcgtacacggatttgtcgcgtccggcaacctgaaaatgccaattcgggctgccgcggaagtgtaatttagggagtttttgagaaggatataaaaagactcattcgaaaaaaggagccaggcagatatgaatcggatttttttctttacggctgcggcgggagtgccgctttcagtcatcggcggcctgatgcattggccgtcagcggttttgtttattatttattgcttgacgattattgcgcttgcaagttatatggggagagcgactgaatctcttgccattatcgcgggaccgcggatcggcggtctgctgaatgccacgttcggcaatgcggtagagctgattatatcgcttttcgccctaaaagaagggctgacgggcatcgtgcttgcttcactgaccggttcggtgctcggcaatcttttgctcgtcgcgggattgtcgttttttatcggcggtttgaaatacaagcggcaggaattcaatattcatgatgcacggcataattctggcctgctgatttttgccattatcgtagcttttgtcattcccgaagtgttttccatggatatgggggaaaaaaacaagcttgatttgagtgtcggcatcagcatcattatgatccttttgtacgtggcagctctttatttcaagctcgtcacccaccgcggtgtttatcagccgaatcagccggaggcaaaggaagaagaggagcagcctgagtggtcggggaaaagagcgacagccgtcttatttatttcaaccattatcgtcgcctacatatctgaaaatcttgtccatacgtttcatgcggtggctgaacagttcggctggagcgagctgtttatcggggtgattatcgtcgcaattgtcggaaatgccgcagagcatgcgtcggcgattattatggcgtacaaagacaagatggatgtcgccgttgaaatcgcggtaggctcgactttgcagatcgccatgtttgtggctccggttcttgtgatctgttccatcttttttccggtcaatatgccgcttgtattcacattgcccgagcttgtcgcgatgatctcatccgtccttttgatgacgatgatttcaaatgacggtgattcgaactggtttgagggggctacgctccttgccgcttatgtcattatggcgatcggttttttcctgctttaacctgtaaaaaatgcggataacaacgtttgcggaggaaaagactaaaggaaaatgctatagaaagagtgatatgatgagaaagctgtttcatgccacactgattctgctgttatcctttagttttttcgcaacgccgtctgccgctgcaaagaaaccgtttaaagttcccaactctgtcgtaagcatttcaaaggaaaatacgtatccgaatgcttcacaggaccagccgatgcttcagccgagcaaactggcaaaggaattgttagatacatccgagatcaacatcgaaaatccgcatctgataaagatgctgaatgaatcctcggtttccggttcaccgcttgccatcggataccgggcgacaatatttctcgggaaatgggcgctcggctatcaatcgaacgaaaccgtcgccaactgggaatataaaaaaatcaatacgaacagagcggataaccggggcgggcagcaaaccgcggttatctcatacgcccaagaacagcaatacaaaatcaaaggcgggctcacagcgaaggtgccgaacgcagaagatgtaaaaagcatgatgatgcaaaaagcgatgaagaaaacaaaactgccgctcgcatttgaaacggttatcggcgcaggcacaaaacgcgatcaaacctacaaaatttctccgcagcggctcggctacctgcacgcctacgctccggccgttaatgaaaaaggaaaagtaacatacggtgaagtgtatttggtgctgaaaggcagcaagcggaaacttgtcgtcaaaaatgtgacttcgcaaggaatcggggcttggattccggtgcagaatcacgtcacattcggttttcaaatgacagcgcagccgagataaataaaaaaagctgattccggttcgggaatcagcttttttgtgtgtgatacatttcctcgagcaattgcacattgttgttgtacagctcccgggcaagaacgcgtctcaccgcaaggctcgccgagaagtattctgtgtcttgaaccatgcctttcactgtaaattcaatgcctctggttaatttgttcagactcataattccatgcacttgaaacggctccgtcgcattgagaaattcatcccgcttcagtgaatcgcgaagctcatcattgagcatgtcgcaggctttttctaacacggcgtatacccgctcgggatcttccttgtaactgatcacgacggactcggtaatccgcataaaatcaatgttatagttttgaagctgtctgacctcaccgttagatatggtaagcagcttgccggtccactcacggatctggagggaacggagtccgatttcttcgactgtgccgttgaacagattgttaatcgtcacgtaatcacctttatgaagctggcgttcgtatattaaaaagacaccggccaatatgtccttgattaacgactgggcgccgaaaccgatgacgataccggcaacacccgccccggctaaaattcggccgaaatcatgaacgaataaagaaatgacgtaaaagataaaaccgatcgtcgccgtatactgggtgatggatcggacgaggctttcaatcgttttccctttccgttcctccaagaaatccgtgcgtttaaataacacctggacaaagcggttgatcagaaaaacaccggcgtaaagcacgagagcgacgatgatgatctcaaccactttgcttttcaaaatgtccgtaattgtcgtttccatcttttgttaacctctggcttttcgtaatgaaaaatctgtgtcctgataataactgtttttgacaaggacgttcgggccgaggcaccggacgtttgtgcagcggcagttcagctctttgctcagcttcgtctgtctccacttgtcatatgcttcgggaaggctgtctgttttaatattgccgagcggcggtgtatcgccgaaatccgtgacaatgatatttccgtcaaaaatgttgacattcaggcgggagcggccgtcagggtcgtttcgcaccgtaacgtttttcgcttcccgcaggcggcggaggagcttctggtcttcttcatcagggctgcatgcgtaaaacgggagcgtaccgaacagcatccatgtctcttcatcgcgaatgtcgagcagatgatgaatggcctgtctcatgtccttcaggctgagtgattcaagcgcgctggcgaaatcactcggatacatcggatggacttcgtgccgctggcatttcatttcttcggtaatttgccgatgaatatgttcaatatgcgacagcgtccgtttgttcagcatcgtttccgctgaaaccattacgcctgcttcgaccagcgtgcggctgttttcaatcattttgtcaaaatagcgcgcccgctgttcaaatgtcggtttcttctccatcatcgcaaatccgatgtcggcaaagtcctcgaccgttccccaattgtgagaaatgtgaagaacgtccaaataaggaataatccgttcgtagcgcccgatatcaagcgtcaggtttgaattgatctgtgtgcgcacgccgcgttcatgggcatatttcaaaagcgggacgacgtattcctttaccgatttcagcgaaagcatcggttcgccgcccgtaatgctgatagagcgtaacagaggaatttcatcaagccgctttaataaaaggtcgatcggcagcgcattcgggtctttcggctggagcgtgtacccgacggcgcagtgctcgcatctcatattgcacaaagtcgtcgttgtgaattcaacgttcgtcagtttcatatctccatactggtcgacatccatgtacgcttcccaaggatcgtactccggtgtgatcggacgcagtgttgtgttttgtgtcatgactatctaactcctttataaatggggcatactaacgtctgccaactgttaattttagacctgatctgccaagatcgcaagtagcggaaccattgaaaaacggcaaaaaatacgctaccattataaaaaatgaatggagtggaagtatggggaatgcagtaaacagcaaagatcagcagctcgattacctgaagaacagactcgatatgtttatgaatgtcattgattcattagaccctgaatcaacggacgttgaagatatagaccggctcatcggcatgcttgatgatctggaagcaaaatacgaacgctttaaaaaggattgggaataaaccccggcggatgccggggtttttctttttccataatgcggctgtataaaagggcagagcctactgcaaaataaggaaaaatgcagaaggagtgctggtcatgaaatggttttgttcaatttgctgcatggccgttttacttgcgggaggcatcaacagcgcagaagccgtgccgaatgaacggataaactggggatttaaacgcagcgtcaatcatcagccgccggatgccggcagacagctaaacaatctggtcaaaaaatatgatgccttttatttgggcaatacgaaagaaaagaccatctatttaacgtttgataatggatatgaaaatgggtacaccccgaaagtgcttgatgtgttaaaaaaacatcacgtcacgggcactttttttgtcacgggtcattttgtgaaagagcagcctgatttgattaaacggatgtcaaaggaaggccatatcatcggcaatcattcttttcatcatcctgatctgacgacaaaaacgggcgatcagattcaagacgaactcgattccgtcacggaagctgtgtacaacattaccggaaaacgggacaacctgtatctccgtccgccgcgcggcgtattcagcgaatatgtcctcaaagaaacgaagcgcctcggctaccaaaccgttttctggtccgtcgcatttgtcgactggaaggttaacgagcaaaaagggaaacaatacgcctatgatcacatgataaagcaggcgcatcccggcgcgatctaccttctccacaccgtttcaaaggacaattcagaagctctggacgatgccattaccgatttgaaaaaagaaggctacacgtttaaaagcattgatgacctgatgtttgagaaagaaatgaagctgccgcgcctgtagaaaacacctctcctggtaatggagaggtgttttgttatttcaggcatttaatcaaagcggcccaatccagatccccgaagccttgtgcgatcccgctttcaaaatggctcttggccagttcggcaagagggagttttgcggaaacctgttctgcggcggcgagcgccagattggtatccttcagccctaaagacattttgaaaccggccggctcaaatttctcctcagccatgatcgtgccgtaattttgatagacgggagagccaaagagcgcgccggcgatttctaaaaattgtttttgttctaacccgtacttctccatcattaagaacgattcagataacgcctcaagcatggacacgagcaagaaattgatgctgattttcgcggcattggccgtttttgtttcttcaccagtatcaaatacttgctgactcaggatgttaagcagcggttcggcctttttcttcgcttccgccggtccggctgtgatgatgcgaagctcggccttctcggcggcatcggggcggccgaggacgggagcggcaataaaggactgtcctctgcccgaatgtgcggcggaaagctgttctgacagcgccgtactgatcgtgctcattgaaatatgaatgccgttttcagataacccggcaataatgccgcaagctccgaacgttacgtctattacggcgtcatcgtctgacagcatggacagcacgatgtccgcatgttcagctgcctgtcggggcgtttcggcatattctgcccctttatccagcaggtcagccgctttttctttcgtccggttatatacagtcagactgtatccggctttcataatattttcggcgatggggcggcccatattgccgagtccgacgatggcgatcttcatttgacagtccctccaatgaaaagttttccaccattatacatgcaaaatggttaatctgctgtgtacaggattgccactttcagttcaggttctgaagaccatccggagtctgaggcggctttccccttataaaatccggtaaatcgggttttgatgattgtttttgaacggggttttacagtgaacgtttttgatttgaatgtgacgtactttatgttttctgataaatccggggtgacagaaatggtttgttccccttttccgtaatgattgatataaagtgtgcagctcatgcctgctctttttcgctcaaccagatgactgcattcgctgcggtgcttcacatattcgacagcctctttttcgggcgcgaactgttttaaggaaaaaacggcatattcggtggcaggactgataccggaagcggcccccatactgagaaagaacagaaacagccccgccgcgggaagcgtccgcctgaacgcggcggcacaccagattaacgccgcaaagtaaagcacgaccccgggaatgacggagatatgggctccatcttccagccaagaggaaaagccgagcgactcaaagatgtaatcagacaccgtacggccgttatacagcggggcaatggacatgacactgaaagccaggaggacagaagaaatgattttgtgagaaaggatggtaacggcgcacacctctttacgtttttttccagactatcatgttttctcaaaaaaaagaacagccggcagccgttcttacttgaaaatattaaaccagcctttgcgggcgaaccaaaacagcatggcggccacaagaacggccattacgcccaaaacgataaaatacccgtatttccaatgaagctcaggcatgttatcgaaattcatgccgtaaacccccgcgatgaacgtcagcgggataaaaatggtcgagacgatggttaatgtcatcataatggcgttcatccggtttgaattcagcgtcacatagctgtcccgcaaatctgacgtcatatcacggtttgactcgatcagctcagccagttttaacaggtggtcataaatatcgctgaaatacgctttcgtttcacggctttcttttacatggtcaaggctcaaaatccggtacattaaatcgcgcatcggaatgatcgtccgcctcaggttcaaaagatcagtccgcaattcaaacacttcattcattaaagtgccgtaagatttatgggttctgctgtcttcaatttcattcagccggtcttcaattttgtacagcacggggaaatattcatcgacaagctgatccataatcatataagtgatgtgcccgggcccttttttggctaatcccggagaagcgaaaaaccgttctctcacctttgagacgccgggcgattcgtgcaaatggaagctgacgatgaaacggtcggactgaaaaatgtccacctcttccatttccagtgtgtccgggttcaaggcgtggagcacataaaaacggtagccgtcataatggtcgattttcggccgctgcatatgctgaaagcaatcctcgatcgcaagcggatgaaagtgaaaataatcacgcagcagctcggtttcatgcatctcagcgccgaaaaaatcaatccagtaccatgcgatgtccggttgttctgtacgtgatagggggatattatctaatatctcattatgtgttgtgattgcggttatatgtatcataaacaaccctccgcctgccattatatcatgcggcgttatgaagaaaagtatacgaattgccgcccggccgcttcatgatatacttggacaaaaaggggtggagcatatgtggaaggaaacggtttcggtcacaccgccgtatcattttgataaagtccttgaaaggctgtcgctcgatccgctgaatgcggtcgatcttcatgcaagatcaatcaaagtgccgctcagaacacgggacggcaaactgtccgtcatcacggttcaagcggaaggcaccgccgcagacccggtctttctcgtcagcggagaaacggaccgcgaggagatgattgaacggatcaaacacatttttcagtgggagcagccgcttcagcctgtgcttgatcatttctcaaaaacaaatctgtcggcgctttttgaggagcatgcgggaaccccgctcgtcttggaatatgacgtctacaactgtctcatgaaatgcatcatccaccagcagctcaacctgtccttcgcttttactttaacggaacggttcgtccatgccttcggtgaacaaaaagacggcgtctggtgctatcccgagccgaaaacgatcgcggggcttgagtatcaggacttgcgggagctccagttcagcatgagaaaagcggaatatgcgattgacatttcacggatgattgcagaaggagcgctcaatctggcggaacttacccatttatcggatgaagacattatgaaaaagctgatcgccatcagaggcatcggcccgtggaccgtccaaaacgtcctcatgttcggcctcggccgcccgaatctgtttcctttggcggacatcggcctgcaaaacgccgtcaaacgccgcttcgcccttgaggataaaccgtcaaaagacgtgatgctccaggtaagcagcgaatgggcgccgtatttaagctatgcgtccttgtacttgtggagaagtattgaatgatgaggatttttggaaacttccagtgaaaaacatgaaggaaccgccggctgcatgttatactgaaaagatgtgatatttcaaatcagccgttttcccatgagaaaggctttatatagaaacggagagaaaaaaacgtgaatcaacatcaaaaaaaggcgcctgccgaattgaaaatcggacagacatttccgctgaccatcaaacgtctcggcattaacggagagggcgtcggctattttaagaaaaaagttgtcttcgttcccggcgctctgcccggtgaagaagtcgttgccgaagcgacaaatgtgcagccgaaattttcagaagcacgtgtcaaaaaaatccgcaagccgtctgaacaccgcgtcacgccgccatgcccggtctacgaccagtgcggcggctgtcagcttcagcatctggcatacacccagcagcttcgcgaaaaacgcgacatcgtcattcagtctctggaacgtcatacgagattcaatgtcgaagaaatgaacattaaagatacgatcggaatggacaacccttggaattaccggaacaaaagccagttccaagtcggacgctcgcaaagcggcagcatcattgccggcttatacggactggattcccataaaatcgttccgattaaggaatgcattgtccagcatccggcgacaaacaaaacaacgggtatcgtccgccgtattttggaaaaacacaacgtatccgtttataacgaacggaccaaaaaaggcgatgtccgcaccatcgtgacgagagtcggttttgaaacaggcgaagtgcaggtcgtgcttgtcaccgcgaaagagacactgccgaataaagacgaaatcgtcaaagccattcagaaccgtctgccggaagtgaaatcgattattcaaaacgtcaacggcgcgcgcacatccgtcattttcggtgacaaaacaaaagcgttggccggaagccatgccattcaagaagtgctcggtgacgtgtcatttgaactgagcgcccgcgccttcttccagctcaaccctgagcagacggtcaagctgtatgacgaagtgaaacaagcggctcagctgacaggaaaagaaaaagtcgtagacgcgtattgcggcgtcggtacgatcggcatgtgggtttcaagcggcgcaaaagagatccgcggcatggacgtcattaaagaatcaattgacgatgcgaagaaaaacgccaaaaaacacggcatcaaaaacgcagcatatgtcacaggaactgccgaacactggctcccgaaatggacgaaagaaggcttccgccctgacgtggtcatcgtcgacccgccgagaaccggctgtgacagaacatttttagataccatcaaaaaagtaaaaccgaaacgcttcgtctacgtatcctgcaatccttccacactggcgaaagacttgcagacgctgtcgaaggactatcgcgtcgaatatattcagcctgttgatatgtttccgcagacggctcatgtggaagccgtggcgaagcttgtattaaaatcgtctaactaaaataaacaattcgtaatcagacctggatttcggtaaattaaacaattccgatttccgggttttttcatgttttgcccttgtcctatctgtcttttgtctttatttaactgataaaaagagttgaaaaaaacgtatggaaaagcaagtgaaaaacagccaagtaggctgctttctattaacactttctttttttcgtttggaaacggcattacagacaaaatatgaagatcttgttgtgaaccagaagcaataacaagtcgttcaagttccgtgaatacttgtaattttagttaatattttgtaaacttctttcttaaagaataaagtccccgacactcatcggcacatctactattggcgatagttgtaataaatgataaaaagaaggtgaaaccgaatgagagatattggaacctcaaccactgaacgaaggttctgaagcagaagctgtaaaaggcaaggttgcttacttacactaatcacaacggcagttggcacatctactattagcaacaactgtggataaaagatcaaacacactaaaaaagcatgtttggtcgttatacatgatatgaaagcctaaacaggaaaaaaggaccccgattattttccttattcccaaagaaggaataaacccgaggcggaaacacaagtgataacaactattacagtaatacctgcgatggttatatccttaataagtaattatcgcgacaatcatgcttcatactataatgatgttagattgtcacttggctaaaaagtattgcagaaaaggaaatggataatgaaatggataaagtaaacaaaaaacggccgttgtataaaaaaagttggtttctcacggttttggcatttttagtttcacagctttattttaattttgcagaattaaccggatggggtcctaattatagagaaatgaatggattcccagcaaacatagctgaactggatttctttcaaacatatctttcattctatgataatccatggtttaatattgtcactgttttcttgggggttttcactgttatacaaatcatcacaggtataacaaaggatattcgaaatgaaagcaataacttctgatgccttatttaatgatgaaagaaaatgaacactttcttattaatcttatgaatgaagactgcggcacttagtcagcagtctattttattggttttggatcaggattactgaatcgtaaccttatacaaacatatataggtgattgtataaagatattaacatatggggtttgaaagccaatcgacccttagtacatatactgtatagagacagaagccacttgttgcgttggttatttctaaaccatgagcaaatccaaaagatccagattgaagttcttgaattctgttaagttcgagtttattttctcttcccatcccatcctctttactccatgtgattcacaagcggtaagttaaggttttttctttttacattctcttaagtactcagatataccaccctcagccccatttgcttaatcaaatgattttttcgcaaatgatattgagatacggatatggtgcagcgttaaatattttatcttcgataacaggacaattattttgcattggtaatagggagaactcatatgatattctatttaggttggaatcctttttgtccaaaaagagcaaaagtaaggccgctaagaaagatgaaggtcagcgctactattaataaaccacaatataaataaaaaaataggtgtagataatcatcacacttttttctctcaaacccttttaaaggtggttaactcaattaaggtgttctgcttcagtttgcttttcactttttcacgtgtaaaaagtgaaatgttcaaaatttactatcgtttgataagaagtgctgacacatgctataagtgtaaaagaagcatggtcagtttttaattttgggatcaaggtttggctgtatcccatcatgaaaggatttggatttgttatgacagataatttctggcgtgaattaccgcggccattttttgtactggcaccaatggaagatgtgacggatgtcgtttttcgccatgttgtgagtgaagcaggcagacctgatgtgtttttcacagagtttacaaactcagaaagctattgtcacccggatgggaaggatagtgtgcgcggccgtttgactttcacggaggatgaacagccgatggttgcccacatatggggagataagcctgaaaactttcgccaaatgagtattgggatggcggaattagggtttaagggcgtggatatcaatatgggctgtcctgtacctaatgtggcggggaatggaaagggaagcggcctgatttgccgtcctgaagttgcagccgaattaatacaggcggcgaaagcaggaggtctgccggtaagtgtgaagaccagacttggctacacggatatagatgaatggcgcggctggctgacacacatactgaaacaagacattgcgaatctttccattcatctgcgtacaagagcggaaatgagtaaagtagatgcgcattgggagctcatcccggaaatcaagaaacttcgtgatgagatagcgccggataccctattgacgatcaatggggatattcctgaccgtgaaaccggcttgaaactcgctgaacaatacggtgttgacgggattatgattggacgaggcatttttactaatccattcgcctttgaaaaggagccgagagagcatagcagtaaggaattgcttgatcttttgagattgcacctggatcttcatgatgaatattcaaaagcagaagctcgagcatataaaccgctcccccgcttttttaagatatatctccgcggattccgtggagcaagtgaattaagaaatcaatgcatgaatacaaagtcaacagatgaagtgcgtgcattgctcgatgactttgagagaaagtatcttgatgggatggagcaagagtgacataaataactcttcatccggcccggatttcggtttgaattccgggtctttttgtgtgcagtttttacccagacagatccatggccagtttcgtcatgcagaaataaacgaatcatggtacattgataggacatacatcataaaggggagagaaaaatgaaacgactgtgcatcatcccctgcggcaagaaaaaaatttgggatgtccattcagatacaggtccggtaagggcggaagacgcttatctcagcccgtttcatcaggcgtgcgagcgatatgcgaaagcatttttcgatgagtgggtaattttgtcggcaaagcacggattccttcgtccggatgatatggttcccggaaattacgatgtcacttttggaaccggtcatccggagatcatggcagcggacgagctgcgccgtcaatttcatgaaaaaggcttttccgacatcgaagagcttgtcatgcttggcgggaaaaaataccgaagcgtcctaaacgccgtcatcagagagcatcagcatatcacctggcctttgtcatcgtataaaggcattggctacatgcttcaagcgctgaatcgggctgttgaagaaaagcatgaactgcagcacgtggatatgaaaaaaaagagtgtaaccactcaaacgccacgatagactgtatgcagaagaatgaagcagttaaaagatttccgaggaaataaatacgtcgatcattgtcaaagacagggtgatgcccggtcttttttgtatgctttaaaacgagacaaagggaacagattgagacaaaatgagacacctgtctcaaactgtctccattgtaaaaataaaaacattcattttacgggcttcaaaggctggcatgcttcttgcatttataagtgtgaaccctaaatagaaggaggcgcacaaaatggaattgttaaaacgagaaggcttgtcattaactgaggagaaagcgctgtggatgtaccaaaagatgctggaaatcaggggctttgaagacaaagtgcatgaactgttcgcgcaaggagtgcttcccggattcgtccatttgtatgccggtgaagaagcggtagctgcgggggtgtgcgctcatttagatgatggcgacagcattacaagcacacacaggggacatggccattgtatcgccaaaggctgtgatctggacggcatgatggcggaaatattcggaaaagcgaccggactgtgtaaaggcaaaggcggttctatgcacattgcggatcttgataaaggcatgttaggcgcaaatggaatcgtcgggggcggattcacgctcgcatgcggatcagcgctcacggctaaatataaacaaactaaaaatgtaagcgtttgcttttttggggacggagccaataaccaagggaccttccatgaagggctgaacttagcggcagtatggaaccttcctgtcgtgttcatcgccgaaaacaacggctacggcgaagccacgacatttgagtacgcatcagcctgtaattcaatcgccgatcgggcggctgcctacaacatgccgggggtcacggtggacggaaaagatattttagcagtttatcaggcagccggggaagcgatagaaagagcaagaaacggcggaggcccatctttgattgaatgtatgacttacagaaactacggccatttcgaaggggatgcccaaacttataaaacaaaggatgaaaagactgagcatcttgaagaaaaggatgccattcaaggctttaaaaactatcttctaaaagaaacagatgcaaataaactgtcagacatcgaacagcgtgtcagcgaatcgattgaaaaagccgtctcgttcagcgaaaagagtccatatccgaaagagtcagagctgttgacagacgtctacgtgtcatatgaaaaagggggaatgtgagatggcgagagtcataagcatgtcggacgcgatcaatgaagcaatgaagcttgcgatgagaaaagacgacaatgtgcttgtaatcggtgaagatgtcgccgggggagcggcggtcgatcacttgcaagatgatgaagcatggggcggtgtactgggggtcacaaaggggctcgtacaggaattcggcagaagcagggtgctggacacaccaatttctgaggcgggctacatgggtgcggccatggctgcggcatccacggggctgagaccgattgcggaactgatgtttaacgattttatcggaacgtgctttgaccaagtgatcaaccaaggggcgaaattccgctatatgttcggcggtaaagcgcaagtgccgatcaccgtccgcaccacatacggagccgggttccgggcagccgctcagcattcacaggcgctgtatggcctgttcacgagcatccctggactgaagacagttgtgccgtccaatccgtatgacgccaaaggtttgctgctttcggcaatagaagacaatgatccggtattcttttttgaagataaaacgtcctacaacatgaagggcgaggtgccggaagattattatacaattccgctcggaaaggcggatatcaaacgcgaaggcagcgacatcacgctctttgcggtcggcaagcaggtcaatactgcgcttgaagcggctgcgcagctttctgagaaaggcatcgacgccgaggtgcttgatccccggagtctgtctcctttagatgaggaagcgattttcacatcgttagaaaaaacaaaccggctgatcatcattgacgaagccaatccgcgctgcagcatcgccacggatattgctgcgattgtcgccgataagggctttgatttgcttgatgcgccgattaagcggattacagcgccgcatacaccagtgccgttttcgccggtgcttgaagatcaatatttgccgacaccagaccaaattgtcagcgtcacgcttgaattgcttggcgagccggcaatgaattaaaggagggatatagaatggctgtaaaagtagtaatgccgaagctgggaatggcgatgaagaaaggtgaagtatccgtctggaataaaaaagtcggcgacccggttgaaaagggagaaagcatcgccagcatcaactcggaaaaaatagaaatggaaatagaagcgcctgaaagcggcacgcttctccatattaaagtcaaagagggagaaggagtcccgccgggaacgcccatctgttatatcggggaaaacggcgaagaagtgcgggagaaggaggcgccggctcctgaaaatgcagggaaaccgcaatctgaacctgaacatattcccgctcccaaagccgtgcaaaagcgtaaacaccgcgtgaaaatatctcccgttgcccgaaaaatggcggagaaagccgggttgaaagttgaaacgctgaacgggacggggcccggaggcagaatcgtaaaagctgacgtcatcaaggccatgaagacggaatctgaaccgcggtcttcggttcagacggcacagccggagggaaaaccggcttcagcgatgagaaaagtgattgcagaccgaatgcacaaaagcctgcaaaacagcgcccagctgacgctgacgatgaaagcggacattacggagcttgtaaaatggcaggagcagctcgccgacagcgcgaaaaagcggagcggtgttaaactgacggtcacacatttcgtatcccgggccgcggtgcttgcgctgaaacagcatcctgagctgaacagctcttatcaagaggagcggatcatcacctatccatatgtccacctcgggatggcggtttctcttgaaaacggtctcgtcgtgccggtgattcgggatgcggaaaagctttcattccttgagcttgcggatcacatcagcacatcggcacgccgggcgcgggaaggcaatgcttccagagatgacctgcacggatcgacattttctattacaaatctcgggggttatggaattgagcatttcaccccgattcttaatccgcctgaagccggtattctcggagtaggcgcaagctatgaaacgcctgcgtttaaaggagatgaacttgtcaaaagcaccatgctgccgctgagccttacctttgatcacagagtatgtgacggcgcaccggctgcggacttcctgaaaacggtcaaagcgctgcttgaagagccggccggattgattttatagagagggtgaagagattgacactagccattatcggcggcgggcctgccggatatgcagctgccgtgactgccgcgcggaggggagaagaagtcgttctgatcgacaaagggccgctcggaggcacttgtctcaatgaggggtgcatcccgacaaagtcgcttttggaaagcgcgaatgtgctcgataaaatcaggcatgcagatacattcggcatcgaactgccgcaaaacattacactcaattgggcccgcatgcaggggcgcaaacggcaaatcgtcagccggctcgtgcagggaattcaatacttaatgaaaacaaatcagattaaagtcatcagcgggacagcttcatttctcacagagcagacattgcttgttgaaggagaaggaggcgcaaaagacattctggaagcggatcggatattgattgcatccggatctgaaccggcggagctgccgtttgccccatttgacggcgattgggtgatcgacagcaaagacgcgctttctttacagaaaatcccttcttctctgcttattgtcgggggaggtgtgatcggctgtgaatttgcctctttattcagccggtttaaaacgaaagtgacggtgattgaatcggctgaccggctgctcccggcagaagacggagaaatcgctgccgttttcgaagactctttaagagacagcggggctgatattcagacgaaagccgcccttcagcggattgacaaagaaaggaaaaccgccgtgtggacaaaagacggcaaagaaattgaggctcaggctgatcacgttttggttgcaatcggcagaaagccgcgtttgcaaggcctgaatctggagcaagccggcatccggtattctccgcgcggtattgaagtcaatgaccatatgcagaccaatgtgcctcatatatatgcgtgcggcgatgcggccggaggaatgcagctggcgcatgccgccattcatgaaggaatcacagccgccgcgcatgcctcgggaaaggaaagcaaagtcaatatgcgggcggtgcctcgctgtatttatacatcgccggaaatggccgctgtcgggctgacggaaacacaggcgagagagacatacggagatgtgaaaatcggagaatgctcattttctgctaacggaaaagcgttaattaaacatcagcatggcggcaaaatgaaaatcattgccgaaccggaattcggagaaatcgtcggcgtgtcaatgatcgggccggacgtgacggaattgatcggtcaggcggtcatgatgatgaacggtgaaatgacggcggatatgtcggagcactttatcgcggcgcatccgactctgtcagaaacgcttcaggaagccctgctgaatgtcaccggacttgcggtgcattccgtataaccggaataccctttctcagatgagaaggggtatttttcgttgaaagcgctttatttttcccctacaatatatgaaaagatggtctgaacaggggggagcgaatacaatgaatgtcattcggaatgattttaaaacctggaagcgctttgtgaaagaaggcgtgcttgatgaatcccgtattcagaagcgggtggccgcctcatggcaccgctgcaaaaaagccgacgtcaacccttatctcgaaaaggggccgaatgtaatgccggcagatcatttagaaaggcaggccgaaaagcatgcgttatttttagcggcctcaacgccgtatgcagaaagaatgaaaacggcgatgcgggaaatggaaatgatggttctcctgattgattcagacggcgttgtccattcagttgacggccacccgcgcaccattcatgaagcgaaccgcatcaatttcttaaaaggcgcccgctggacggaaacggccgtcggcacgaatgcgatcgggacggctctttatacaaaagagccggtcatgatacacggctctgaacattattcgctcgcttctcatcaatggagctgttccgccgcgccgatccgttatgaagacgggcggctggcgggtgtcattgatatttcctgccccgccgcccgcgctcagccgtttatgctcggaattgcctcctccatcgcttatacggcggaacgggagcttgccctaaagatcaaaatgacagaacttgacatgatcagcaagttcgccgggcttacccggtctcacgatccgatcgtgctttgcaatgaaatgagccgggttatcgccgcaagccgtcccgttcagcattttaccggacatacgctgcgcgagcttgaggaacatggctatcacatcaagcaggcgaagcgggaggagaacggctacacatgcgtttatttatccaaacgagaagaaaagccgtcttttatattccatggtgcggcaggcaaaagcccgtcatcccgacatatgcttcagcagctggagcttgtcgcccgaacggacgcaaccgtttgtcttacgggagaaaccgggacgggaaaggaggttgccgcccgggcgattcataacaacagctccaggaaaaacggcccgtttatcgccgtcaattgcggagcggtccccgaaaagctgattgaaagcgaactgttcggctactcggaaggcgccttcaccggggccaaacggaaaggacataacggcgctttgcaaaaagccgataaaggcacgcttttcctcgatgaaatcggagaaatatcacactccatgcaggtcgctctgttacgggtgctgcaggaacggaaagtcaccccggtcggcgggacaaaagagattcccgttgacatcagaatcatcactgccacccacactgatctgagacagcttgtccaatgcaaaaagctgagagaagatttattttaccggcttcacgtctgtccgatccacctccctccattaagagaacgcaccgaagacattcccggcctcttccttgaatttcagcgaaatcgcggctggcggggggagcttcctgatgactttttagacctattaaagagccggaaatggccggggaatatcagggaattgtttaatgtatttgaacgtctttccgtcatgttcccggacgggcggctgtcagaacgccccatcgcagccctgcttgaagcgtcaggtcttaaagaggcggccgagtcttatgaacaggaagaagcgtcccctgtctccatccgggagcacattcagaaaaacatcatcgtaaacgcgcttgaatcagcgaaggggaatgtcacgctggccgccaaaatggccggaatcccgcggagcacgttttacaaacgcctcaaaaaattcaaactcaccaccggacaattgtaagaaacaagcatacttctcttggctgccggacacgttatgtgtgaggcctaaaggaggtttgagacgtgaatacacagcgtgcgaaagacatttcagaatccgccgccatggcgtatgtgacgtacgaaggagttccgatttatattcagcatgtcaacgaagacaaggaaacagccagaatttttccgatcggaaatccgcaatttgagcaggaagtgctgctttctgatttacaagagcatttttgagaatgggtctgctgatgacagcaggcctttttcgtacctgtgggaactttcccgctttttgagaaaaataactaaaaatgattaaatgatctaactcctccaaacccggtacagatcggaccttctcatgatataaataaaatgtaaacgttatcagaggagggcttcacatgacagacaaatcattctcaatcgttattgcaggcggcggcagcacatttacccccggaattgtattaatgcttttgaatcacctggaagagtttccgatcagaaagctgaaactttatgacaatgataaagaaaggcaggagcggattgcgggtgcgtgtgaggtatttataaaagaaaaagcgccgaacattgaatttctggcgactgatgacccagagacggcttttacggatgttgacttcgtcatggcgcatatccgcgtcggaaaatatgcgatgcgcgcgcttgatgaacaaatcccgctgaagtacggcgtggtcggccaggaaacatgcgggccgggcggaatcgcatacggcatgcgctctatcggcggtgttctggagattcttgattatatggaaacgtactcgcccgacgcatggatgctgaattactccaatccggcggcgattgtggccgaagctacacggcgcctcagaccgaattcaaaaatattgaacatatgcgacatgccggtcggaattgaggatcgcatggcgaacatcctcggattatcttcacgaaaagaaatgaacgtccgttactacggtctaaatcactttggctggtggacgtccatcacagaccggcatggcaatgatttaatgccgaagctgaaagagcatgtccgtgaatacggctacgttccgaagacggaggccgaacagactgaagcaagctggaatgacacattcaaaaaagcgcgcgacgtacaggcggctgatccggatacgcttccgaacacatatctgcaatattacttattcccggatgatatggtgaaaaaatcaaacccgaaccatacgagagccaacgaagtcatggaagggcgggaagctttcattttcagccaatgcgatatgattacgcgcgaacaatcgtcggagaacagtgaaattaaaattgatgatcatgcttcctatatcgtcgaccttgcccgggccatcgcttacaacacaggggagaggatgctgttaatcgttgaaaataacggcgcgatcgcaaactttgatccgtcagccatggttgagattccttgtctcgtaggctcaaacggaccggaaccgctcttagtcgggaacataccgcaatttcaaaaaggcctgatggaacagcaggtgtctgttgaaaaactgacggctgaagcgtgggaagagcggtcatttcaaaagctgtggcaggcgctgatcctgtcaaaaacagtgccgaacgcccgtgtggcaagactgattcttgaagatctgatggaggctaacaaggactactggcctgagcttgatgtaagtccgtctcctatttcctgatgacaatcttccccgttttctttatctgttattctatataatagaaagaaaacggggggatttttgggatgagtcttgaagaactggttaatcagcattacgcgaaattaaatgacaacgatttttatattttaaaatatatattgaatcataaacatacgtgctaccatctcggtatcaatgacatggcgaaagcctgcaatgtctctcggtcttccatcctgcggctcgcccaaaaactgggcttcagcggctacagtgaattccgggtttttctgaaatgggaggatcagcctgaagagggcgagaatatgacgtttgaaaagctgctggatgatattgaagccaatgtaaaatacgtgaagtcaaaagatatgacggagatgtgccggctgatagatgaagcaaaacggattttcgtttacggatcggggacggctcagagggtgtgcgcccgtgagctgcagcggatgtttgtatcccggcggaagtatctgattttaattcaggacatcacagagtttgatatcatgtgtgatgattttaaggttgatgacgtattcatcattatttctttatcaggcgaaacacccgaattaattccgcaggtaaggaccctgtccgcaaagggagttccgtttatttcaatcaccaatctgaaaaacaacgtactggcgcaaacgacgccgtataatctttatgcgaccagcaagccggtgacgttaagcgataaaacggaaatcgtcgcatttgccccgttttttctggtgggcgaagcgttattccgcgcatatgttgattataaagagctcgaaaattttgataaatagcgggaggtcacgtgaaatgatgcaaaaagtccagcgcttcggcagcgcgatgtttgtgcctgttttattatttgcattttccggtattattgtcggtctgagtacgctgtttaaaaataaaacgctgatggggccgctggctgatcctgacgggctttggtatcaatgctggtacgtcattgaacagggcggctggaccgtctttaatcaaatgccgctcctgtttgcgatcggcatacctgtcgccttagcgaaaaaagcgcaggcgcgggcctgtttggaagcgcttacagtttatctgacattcaattactttatcaatgcgattctgacggtttggggcggggcttttcacgtcgatatgaatcaggaagccggcggaacgagcgggctgacgatgatcgccggcatcaaaacgcttgatacgaatattatcggcgccatctttatttcatctattgtcgtgtatttgcacaatcgttattttgataaaaaactgccggatttcctggggatttttcaaggatcttcctacatcgttatcatttctttcttcattatgataccgatttcacttgcggtggcatacgtgtggccgatggttcagtccggaatcggctcgctgcaaagttttctcgtttcttccggggcgatcggcgtgtggatttacacgttcctggagcggattttaattccgaccggcctgcatcattttatttactcgccgtttatttacggtccggctgtggctgaaggcggtatcgtcacctattgggcgcagcatctcggggaatactctcaaagcgtcaaaccgctgaaagaattgttcccgcaggggggcttcgcgcttcacggcaactcgaaaatcttcggcattccgggaatcgcgctcgctttttacgccacggcttcaaaggaaaagaaaaaaatcgtcgccggcctattgatcccggtcaccttgacgtccattgtcgcgggaattacagagccgattgaatttacattcctttttatctctccgtttttatttgcggttcatgctttgcttgccgcttccatggcaaccgtcatgtatatggccggcgtcgtcggaaatatggggggcggtttgatcgaagctgcgaccttgaactggatcccgctggcgtcaagccacggcttgacgtatgtataccagatcatcatcgggttgtgttttaccgctgtttactttttcgtcttccgtttcctcattctcaaattcaacatcgccacaccgggcagagaaaaagaggaagggcaggaaacaaagctctattcgaaaaaggagtacagagaacggaagcgggcttcaaaagaaacagcggcggcagacgaaacacagcgggatacagccgctttgtatattgaagcgctgggcggaaaggacaatattacggaggtcaccaattgcgccacccgtctccgcgtcactgtcgctgatgaatcaaaggtcaaaagtgacgccgatttcagagagctgggagcccacggggtcgtcagaaaaggcagggcgcttcaggtcattgtcggattaggcgttccgcaaatgcgggagcgcattgaacagcaattggatcaataaggtcaaaaccttccctccccgggaaggttttatctttttcgcagattattgaaaaaacggcataccaaatttctttattcatttgccggaaaggcataaaataataatattgaacaaaggatttggaggcttacacatgtcaaaggctttatcatatgtaaaaccgtattctcttttggcgggaatcgctctgtttttcatgctcatcgagcttgcggtagagctgatacagcccctgctgatcgggaaaatcattgacgaaggaattttaaagcaggatctcggtacggtttggctgtggggcggcgtgatgatcggactgaccgctgtttcattcgcatcgggcattttaaattcgttctactccgcccacatcagccagagctatgcgtatgatacgcgaaaagggctttttcaaaagattcaatccttctcctattcgacgtttgcgcaattctcatccacatcgtttatcacccggctgacaaacgatgtgacacaggtccaaaatatgcttttcatgagtctccggtttatgcttcgtgcgccgttaatgatcgcggggggcattattctctcgctgaccgtcaatgcgaaactcgggttttttctgctgatcacggtgccgattttgcttttgtttttgctgtgggtgctgaaaagaggcggcgcgctgtttcggtctgtgcaaaagcggcttgatcaggtcaacacgatcatgcaggaaaacctgacggcgatcaaactgattaaagcgctcctccgtgcaaaccacgaagtgaaacgttttttgaaatcgaatacgaagctgatggaaaaaacggtctccgcttttcgtctcgtggaagcggcgatgccgattttaatgctgctgatgaacatttgcattttgtttatcttatggttcggcgccaaaagcattgctcagggcggagcgcaggtcggcgatgtcgtttccgtcattaactatgcgacgcggattacaggcgcgctgtccgtccttccttttctcatcatggtattttcccgggcgaaggcttccggagaaagaatcggcgaggtgctggaaacagaaggcggcgagggaacggggcaggacccggcacgggcgcttgcaggcgggattgagtttcgcgaagtgtccttccgctatccgggcatggaaaaagacgcgctgcatcacgtgtccttttctgccagcccgaaagaaacggttgccattatgggcgcgacaggttcaggaaaatcaacgctttttcagctgattccgcgcctgtacacggctgattcgggcagtattttcatagacggcaaaccgatcggtgaattctccgcttgcgggctgcgcagggaaatcggctatgttccgcaggaagtgcttctgttttcgggcaccatccgtgaaaatatcgcctgggggcgggaggatgcttcactagatgaagtaatggaagcggcccaagacgcgcaaatccatgacacgattatgaagctgtcaaacggatacgacacggtgctgggacagcggggcgtcaatttgtcaggcgggcagaagcagcggatttccatcgcgcgcgcttttatcagaaagccgtccctcctgctgttagatgacagtacgagcgcgcttgatcttcaaacggaagcgaagcttttacaagcgatcagatcctatgaatgcacgacactgattattacgcagaaaataacgactgcgatgaaggctgacaccatcttattgcttgaagacggcgaactgctggccaaaggcacgcacaaagagctgatggcacagtctcatctgtaccggcagatttatgaatcacaattcggaaaggagggagctgacaatgcaaaaagacattcgtaaacctttccgatatccgaaaataccgctcaaatcaaatgaaggcggcagaaaacgcgcgaaagcaaaagatacaaaaggcacgctgcgcagaatctggtcttatgtagccgagaaaaaagggcttttaacccttgtgatcatcatggtagtcataagcgccatattcggcctgctcggaccgttcgtcatcgggaaagcgattgatcattttatcgtcggacagacgacagacggattggcgggggtgctgttcatcctgtttgggatttacctcgtgcaatcattgtccttatggtttcaaaactattggatgatcaatatctcgcaaagcaccgtgtttaaaatgcggagcgagctgtttacccatctgcatgagctgccgattccgttttttgataaacagcggctcggggacttaatgagccgggtcaccaatgatatcgaaaatgtcagctccactttaaatacatccgtcattcaagtgctgtcgagcgtcattacattcgtcggcacaatctccgtcatgctgtacatgagtccgcttttaacattgatcacgcttttgattattccgatcatgcttttgagcattaaatggatcaccaaccggacgggattgctgtttaaacagcagcagaaaaacctcggcgagctgaacggttttattgaagagtcgatatcaggggcgaaggtcattaaagcctattcgagggaagaccgcgtcatgaaacaatttttagaaaaaaacgcggcgttacaatcatcggggttttgggcgcagacaatttcgggattcattccgaaagtcatgaactctttaaacaatttaagctttacgattatagcggcggtcggcgggctgtttgcgctgaagggatggatttctatcggttctatcgtcgtattcgccgaatactcgcggcagttcacgcgccctttaaatgatttagccaatcagttcaatacgatgttatcggccatcgccggggctgaacgggtgtttgacgtgctggatgaaaaagaggagcgggaagatgaagagcatgcgctgtaccagccgatcaaaacgggagagattgaattccgagatgtctccttcggctatcaggaagacagcccgatcttaaaacacctgtccttcagcgttccgaaaggacaatcaatcgcctttgtcggaccgaccggagcgggtaaaacaaccgttacgagcctgatcgcccgtttttacgagccgaataacggaaaaatcctcattgacggaacggacatcaaaaaactgacgagatccagtctgagaaaaaacatggggtttgtcctgcaggattcctttctctttcagggcacaatcagggagaatatccgctacggccggctggatgcttctgacaaagaggtggaggaagccgcaaaagccgccaatgcccacgggttcatcgaacggctcccgaaaggctacgataccgttcttacccaaaacggcgcgggcatcagccaaggacaaaaacagctcatttccatcgcgagagctgtgctggcggacccggtgctgctcattttggatgaagcgacgagcaacattgacacagtgaccgaagtgaaaatacaagaagcgctcggccgtttaatgacgggcagaacaagcgtcatcatcgctcacaggctgaacacaattcaaaaagccgatcagattcttgtgctgaaagacggcgaaatggctgaaaaaggaacccatgccgaacttctaagccagaacgggttttaccgggaattatatgaaagccagttccgggaatcatagatagggaaaaagacctccgacagagttcggaggtctttttttagcgaaggcaaatagtacttttaagttattttcgttaaatgtaacaaaattacttgacgtaaataagttatgtatatatactagcttacataaagtaagtgataataattttcaaggaggattttatgaataaatcattcgaaacaggaacactgcttttaagggttgtaacaggtattatcttttttgttcacggtttatccaagtttcaagggttggaaggaactacgcaatttttccagagcatcgggattccggcctttatggtctatgtcatcgcgacgattgagcttgtcggcggggttctgatctttttcggtttggcaacgcgcattatcggcgttctgtttgccgtcacattagtcggcgccatcttcacggcgaagctttcctcaccatttatgggcggatcggaatttgatttcatattactggttgcgtcaattcacttagcgctttcaggaagccgtctgctttcattggatcagctccttttcaaatcaaaaaagggagaaactttttcagcataagaaagaaggcgttcaaatgaccggcattcatcaagatacggcaatcggttatgtcaaattgaccattaaaaatatggaacgttcgctcggcttttaccggaatgtaatcggcctacaagtcatctcgcagacagatcgttctgcaagactgtcagcagacggaaaacgcgtcctgctggtgcttgaagaaaatccaagcgccgtcgttctgccggagcggtctgtcaccggcctttaccatttcgcgatacttctgcctgaccggaaagaactcggcatcgcattggccaggctgattgaaaacggcatcgcgctcggtcagggggatcacgcggtcagtgaggctctttacctgtctgatccggacggcaacggtattgaaatatacgccgatcgtccccgcagcacgtggcagcgcgatgcagagggcaattatgtcatgcaaacggcgcccgtcgatgtggacgggcttttggaagaagccggagctgaacggaaaagccgtctcccagaaggaaccgtaatcggtcacatccatcttcatgtgacggatttacaggaagccaaagcgttttacaccgatattctcggttttgacattgtcggcaattacgcgggcatgtccgctctgtttgtttcggcgggagggtatcaccatcacatcggtctgaatatatgggccggaaaacatgcgccgccgaaaccgggaaacgcaagcgggctggattattacaccatcgcgctgccgcatcaaaaagagctgtcacgtgtgacaaaagcgctgaccgatgccggctttgagatcgaagaaaaagaagagggcgtattcgtcaaagaccctgtatcaggggcggatatcgcatttacactgtaagaaacaacccttgccgtctaaccggcaagggtttttatttttatgaagttttcttgggaaggttcgggaaagaagaacgtcgatttgcaatatacacacggcttttgagtgactgaagaaagcgaacatctcagtgaggcgcaaaaatgactcgtggagcagccatcgccggcccgatctcagggcatccgctggattgaaaaagctgtatgggcagactttgaatagaaaaaggcaaaagccgcatccggtcacaagatgcggcttttcatacacaatttacaattgtgtgaaaaatgcccaaaataaattgtgcttcctgattcttcctgatatgataagccgaaaaaggagaacctgaacaaatgaactcaaatgcagcacagacggaacagccgatgaagcataacggaaaccgggtgacgatcaaggactttatcattcttgccaaaccggggattatcatctcaaattcactcgccgcattgggcggattttggatcgcgtggcttcagtcggaaaggacgggcggagggcccgggatatttgccgccatggcggttgccatgatcggaacggcgttggtcatggcatcaagcactgtttttaataacttttttgaccgcggcatggacgcaaaaatggcgcgaacccgcacccgtgccagcgtcacgggaaaaataccgccgccggccatgatcttgtacggcacatgtctcggcgcatgcggattcatcatgcttgcttcacttaatgtactgaccgccgttcttggcctgcttgcatttttgctgtatgccgtcgtttatacgctttggtttaaaagacaatccgtctggagcacatttgttggcagctttcccggggcggctccgcctttaatcggttattgcgcgctgaccgggtacattgatatgcccgcgattttgttatacgcgattatgtttttgtggcagccgccgcatttctgggcgatcggaatcaggcgaaaggaagagtatcgtgccgccggcattccgcttttgccgatcataaaaggcaatcgcgccacaaaaataaaaatgctgcgctatattgccgttctgactgcggtttcgctgctcgttcctctttatatagacgtcagcccgttttataccgcgtccgctctcctgctcggggccatctggctgtaccggagcgtcacaggctttcaggcggcggatgacacgcaatggtcgaaggggatgtttttttattcgattgtgtatttcagtctgctttttcttattttaatggctgattcgtttatcaatgcggttctcagaacgtaaacaggcggcttgcagatacagagccgccccgttttgtttatgcttttttgatgagagccaaaatatcttcaagccaggaaatataattccgttcccgctcaagcgcttttgtcagcacgagataatggccgaaatcaggagaagaaaaagaatccgcctccgcggacgatgtcatcagttcttgataactgttttccagatcggacaatttctccttccgctttacgagctgatcggtgaatagctcatccgcttcttcctgcgtcaacgctgagatgaaataagccttcagcataaattcatccttcaccgtttccggaatcgggtcttttttcgtcagccaggcagcaagctccagctctcccttgtcagtcagcgtgtacatttttttctcaagctttgttccttgaatcgcagtgcgaaacgtaataaatccctcagccgtcagtttttttaattccggataaatctggctgtgctttgcgctccaaaactggccgagctcttccttaaaatagctcgatatatcatatccgctcaattcgccttttcgcaaaagccctaaaatcgcgtactttaaaattctcatgttgtcctccaagccattcatttgacagctagtataccatacggccgctcaaaaacgcagaagtgccggatgcttgtcattgaatctgcggcggcaaaatcagcggaaatatgcagaaaggggttatcgaaacggcagcggaactggaaaaagcctttctcatgtctttgcctcattcatatgacaacatgatataatcattgtaaaaattaagaaataatgggagggacatatgaagacggtgattgtgtatgcaaacccggatgagaacagtttcaatgcggctctcgtaaaatacgtcgtcatggctttaaaggacagcggccaaagctatacggtcattgacttatacgccgaccaatttgatcccgtgctgaagtacggcggcgaaaaaaagcgctctgacatgaaccgggacgctgaaacgaagaaataccggaaactgatgaaagaagcggatcatctcattttcatctacccgctgtggtggggaggcgttccggcgattatgaaaggcttttttgacagagtgcttgtcgccggagaagcctacacatatgaaaacggccgcgtaaaaggactgctccgggcagagacggcacaggtcttttatacggcggattccccgggctggtacttaaagtggttccggaaaaactcggactggattacactgaaaaaaggcattctgcaattttgcggcattcaaaaagccgagcggaaccttttttctgtcgtcaaaacgagcacacccgagctgcgggaaaaatggctgcgccaagcatacgctaaagtccggcgcgcttgtgaaaaaggagcggccgcatgcagataaaagaaatttttgtgattcgctgcctgtcctgtttaagtgtggttctgcttcacgtagtttcaatggtgctgatgattcaggaagagtccttagccagtgccgcccatacggttgatgcttttcggaccctgttgatgttcagcacgccggcgtttatctttatttcggaatttctgcttgccaggtcatacccgggaggcgttcccgcgggttttttaaagaaaaggggcaaagtcattttcgtgccgtttctgtttattgccgcggtggatgccattttaatgaaaagcgtggcggaagaaggagccggcttcgtttcagtgatcggtaaatttttagagaatgtgtttttaggaaacttcatcggctacttcattcttgtgatctttcaattttacattctccatatgctgctgcaccgctggctgaacaacacatctcccatgtgggtgctgtctgtttcgtttatcatcaacgccgtctatctggcttacttttccatctttcatccgccggcatcatcggggcttgattctatttttccgttcttttgggttccgttcccgggctgggtgttttatttctgtctggcattttattgcggaaaggaatatccgcgttttttatcgctcatcaatcagtaccgttatgcggtttacttcagtgcggccgtatcggcaatattgattgtggccgtttcatatatcagcggcggctccatttcctctaagcgtccggatattatgatttacgcggtcagtatgatctttctgtgttttcatctgttttcaaagctcaaaaaagtgcccgcgattgtgatgatgatcagcaactattcgttttcaatctatctgctgcactcctactttttaatcagcggatatcttctggaaggctatttgcgatcaatgcctttgccggctgccatccttcttttatttttgatctgcacgctcggtcccattttcttatcttgggtgtgcaaccatttcagatacggatacctgtttgtcgggaaagtgtatcagccgaagcagaccaaaagaaatacggcggcgcatcaaggccgcacagtctgaaaaaaaggcggcgtttcggccgcctttttgatacggaagttgacataacctgcaaacgaaaccccccgcggcaagccggaagcgaatgccaggcaagcagtatcgggcagcctatctctaattttaatagcgctttcactgtaaggctgaagaccccgctgcggccgttttgacggatgcatttatgacaacataacgccatcgattttctcccttgtgaagaccgatatattgtatacttataggaaatactttcaaaaaaagtgaaaaagagaaaaactgtgagcttggatgaacgactaaaaaggagcggggacattatgaatgactgtgtcaaaacattcggagaacttccggacgaactttattcctttgcgggaggaaaaggaagcattctctctaaaatgtatcaaagcgggtatcctgtgcctgaagggtttgtgattttgccgtctgcctttcaggacggacagctgcgccatcaggcgagagaggctattgatcaatatgtgaaatccatccgcagccgccatgcatctgcgttgtttgccgtacgctcatccgcgctgagcgaggattcagctcaggcttcctttgccggagaattcgatacggtgttgaatgtcaaaacagatcaagacatgtccagggcgattgatgaagtccgccgatcggcacagtcagaaagggtaaaagcgtacagcgccgttcagggaatggaagatgagcatgaaatcgcaatcgtcatccagctgatgataccgtctgagatatccggagtgctgtttaccgcagatccgattacggggagcaggcgggagatgacaggcaattacgtctacggtctcggggagcagctcgtttccggggaagccgatgcctattcttttaaactggcacggcccaagaaaaaatatgacggccccggggaatttcgcaaatatgcgtcaaagctctataaactggcgaaaaagctggaaaaagatcttggagggccgcaggatattgaatgggccgccgcgggcgggacattgtatattcttcaatcccgcccgattacgaccttacaggccggaaatctggaaacctatgaatggaatgattctttcagcggtgattttttatggacaaacacaaatataggagaagcgattcccgatgtgatgacgccgctgacatggtcgctcctccggaatctggatgaagagtcgggcatcattccgggctattatgtctggtccggcaatatttgcggaagagcctataacaatatgagccagcctctttccgttctcgccgctttcggtctgaatccgaaaggcggaaaaataggaaaaatgatgagcgatacattgggagaaatcccggcggaaatgaagattcctttatatccgttctcaaagtatgaacttttgaagatcatctcgaaaaaactgaaaccgtatctgtcgaaaatgaagctcgcgaaaaaaaacatgtcctcctacttggacgaatcgccggagtggtgccggaatattgaggaaaagctgaaacgggccgaaacggagcgggcattattagcgatatggaacaatgagatctatccgtatttatgcaacgcgtggtttgcgttaatatccggcgggcgtgattctgcgcaatcctcttcgtcgttaacctctcaattaacaaaactcgcagggatagaagatgcgaatctcctgctgtccaatctgaggggaaaaggcggactggccagcctggagccgattatcggcattgatcaagtcatgaaaggccgtatgagcgaggaagaatatctcaggaaccaaggccaccgtggcccgcatgaatacgaactttccataccgcatccgggagaaaaccgggattggctgacgaagcagatcaaagaacacaaggagtcgggtattgatgccgaacaactgcttttgaaacagcagcgggcgcatgaacaggccttccgaagatttgaagaaaagtttcctcataaggtcaaatggctcaaagccaaaatggaaaaagcgtcagaatacgcgaatattagagagacaaccagatccgaatttgtcagggtgtaccggacagccagagcattcgcgctcagagcggcggaaatgaccggcatgaaggacgatattttcttcttgtatctgcatgaaataaccgatctgctcgcggggaaagagccggcggttgcgtcaattcaagcgagaaagcaaaactatgaaacctataaaaaactgccgccgttcccatccgttattaacggaaggttcaatccgtttaaatgggctgaagatcctgacagaagagcggattattacgatgcttttatgccggcggaaactgatgatgcgcatactttaaaaggtttcgcgggagcggccgggagagtggagggcattgtccgtgtccttgatgctccggaagacggggattcttttgcggcgggggaaattttagtgacttcgacaaccaatgtaggctggaccccgctttttccaagagcggctgctatcataacggacgtcggcgcccctttgtcccacgcggcgatcgttgcccgggaactgggaattcctgccgttgtcgggtgcggaaatgcaacgtcaaaactgaaaacgggggacagggtggccgttgacggcgggcaaggcattgtccagctggaaccgcggcagactccggtcacttctgaagaggaaaatggtaaactgatagaataaaaacatgggaaaggagccgcgcatgaataaagcagttattaacggggagcaaatcagaagtatgagcgacctgcaccagacattgaaaaaggaacttgcccttcccgaatactacggtgaaaaccttgacgctttatgggattgtctgaccggctgggtggaataccccctcgttttagaatggagacagtttgaacaaagcaagcagcttacagaaaatggcgccgagagtgtgcttcaggtctttcgtgaagcgaaagcggaaggctgcgacatcaccatcatactttcataatacgatcaacgggagagagacaaaaatggaaaaacaaatcctcagctatccgattggagagtatcagccggctgaatcgatttcggccggacagaaacaagaatggatcaatacgctcgaacacgctccggccaaactgaaacaagctgtcagagcgatgtcggacagtcagcttgatacgccgtaccgcgaagggggatggactgtccgccaagtggttcaccatctggcggacagccacatgaacggctatacccggtttaaattgagcttaacggagaatgaaccggaaatccgtccttatgatgaaaaaggctgggccgatcttcatgattccaaaaccgccgcttgcggggatgcgcttgagctgttaacgatcctgcacagaagatgggccgctcttttgcgctccatgacggaagcccaattcaaacggacatacttccatcctgtatctaaagagacggttacgctggaacaagcgctcggactatatgtctggcactctgaacatcacatcgctcatattactgagctttcccggaggatgggctggcatctgtcttagagggtgccggctttcggaaaaacgccaaaacagccgcagatacaatcgtgcataatgaaatgacggcggctgccgtataaagatggtggtagccgctggcaatgcccgcttcaatcgcatcagaaaccgcttttttgacagcgggaacggggattcggctcacttgctcctgcaacgaagaaagtccgccgccgatatccggcgtttgcgcctgatcagcgggaatgccgcttttcgctaaacggtttttgatgtcatctccgatccggtcaaagcccgctgtaatgaagccggcatataaagccggagcgagcgtcagcccgacctgccttacgagtgacagcgtgccgagcgctgttcctttgttttggcccgccgtttctgatacaagcacattcagcggagccccgagcagaaatccgaaaccgatccccgcaatgacactcgctgtgacaaattcccatttatccgtcacccataacggaaacaggctgaagcctgcaaatgcgatggcgcctgatacaaccgcggaaaagaccggaccttttttatccgtgatcgccccgccgagccacgctccgatgcctgacgccaacgcgagcggcgtcatccaataacccgctttctccgccgatacgtgcaaatattgctccgcataagaaggaataaaaatgaccgcagcgagcagccctcccgataaaaatccgatgacgagcgtccattgaaacactttattttgcagcagcgagtaggcgagaatcggatcgccccctcggttttcaacccgcttttcgaccttaagcagcaccagaaagagaagtgcagctcccaaaagatacccgtatacctttacgtccattatgctttctgacagcttcgccccatcgagattcgtgataccgatcatacaagataagatcgcaagagacagcagcattgtgccggtgaggtcaagccgtttcgcctcaggctctttcgtttcagcgataaacaaaccgccgcacacaaccaaagcggcggcaatcggcaggttaatcaagaacagccaatgccacgacccggttacatcaagcaaaaagctcccgatattcggtccgaggacggccgccataccgttcatcgcccctaaaagcccgagagctttcccttgtttctccttcggaagcacggccagcacatgcgaactcccgataataaaaattccgccgccgccaagcgcctgaatgagccgtgccgccaaaaacatggggaagctctgactgagtgcgacaagcaaagagccgagtccgaacagcccgacttcaatcataaacagctttttccgcccgtatcggtccgacagcttgccgacaatcggcacactgacactgagtcccaatgtgtaaagggtcactccccacgatccccatgaaggagaaacatcaaaagagccgttaatcgtcgtcagagcagcggaaataattccgttgtccagcgccgccatgaacacaccgatcgtaaagagagtgatggcccggctctggtttttttctgtttgcaatggcttcggcatactgatcaatcctcctgtttttaattcacttcgaatatattattcacttcaagtgaattaaatgtcaaacaaaaaaaggccgccgataccggcaggcctttttcatctctatccctgtttggaagaatcaagcgctcttgccaaaatggcaagcccttgattgaccgtttgtttttcttcagcggtcagtgtttccaatgaacgcttcaattttacatgtcctttttgataaaggctgcggaaaatatctttcgcgttttccgttaattgaacgacgactgaacggcggtcttcttctgacggagcgcgtgtaatgaaacttgatttttctaaacggtcaagcagccccgtcgtatttgaaagggaggcgcccattttctccgctatgtcactcaccttaagcgtcccgtggttgttcagaagcatcagcactttcatttgcggcatgctcatatcaagcttcatccactccgacacatcgccgagccccgccgatgtcatcactttcatgtacagcacccaaatatcccgttcctcaggagaaaaaatatcgccgcttaatactgttgtatcatacagattataatccatcgtctcacttcctcatttatactcctgcataccatattactgattttaatcagagaaagaaagttgcagacgagttttgtttgaatgtgaggtggtagtgtataatatgttggagattattgggggaattataataaataagctattttatgatgattggagagaacattgctgactaaaaagaatgccttatcgatattaaaagtattatttcctattgcagttttgcttttagtcatttatcagtccaaaaaggaattgacagacctttcttttaaacgaacgctgtacattattaacgggattgagcgttacgatttatttattctcgtcctgctcggccttcttgccgtcagcgcaatgtccttttatgactttgtgctgaaacggacgcttcgcctcaacattccgaattggaaagtattcagggtctcctttatcgccaattcctttaacaatgtccttggattcggcggtctggcgggtgtcgggctgcggacgatgctatacaaagaacatacgaatgacgtaaaacgcctcgtcgcaggcatcgcctggcttacgtcctcagcgctgctcgggctgtccgtcttcagtatcctgaccatcgcccgggttctgccggttggagagattacaggtgagaaaccgtggctgtgggctgttatcgccggagtggcgcttatcgtgccggcagccttaatcgccgctgggatcaacaataaaaaagctggcgcagaagacggtgaagcaaaaccgaggcatccggttttttcttacatcggggcatcgtttgctgaatggtttgcggcggctgtcgtcatgtattattccttgtatgtcatgggaattcacgcggatgtccgccatgtattcggtgtatttgccattgccgctatcgggggaatcatcagtcttgtgccgggaggattcggttcgtttgaccttctgtttctgctcggcatgcagaatatgggctttccgcaggaggcggttgtgacatccatcgtcatctaccggattgtgtattcatttattccgtttgtgttcgggctgttctttgcggctggcgatttaacggaaaatacgcttaaacggctggaatcaaatccgaagatggcgcccgccgtggaaacgacgaacgtgcttctcgtattccagcgcgctatcttaatcagggtgctttacggttcgctgtcgcttttggttttcatggcgggagtggtcgtgctggcgtccgtcgccctgccgattgacagggagacggtcatcccgcatattccgcgcccggcgctccttgcgtttaacgcgttatcgttaagcgcggctttgattcttttaatcttgccgattgaattatacaaacggacgaaacgttcttattcaatggcggttgccgcgttggtcggcggttttgtgttcagtttcttaaaaggattgaacatcagcgcgatctttattctgcctgtcgtcatcgtattgcttgtgctgttaaagcggcagtttatcagagagcaggcttcgtatacgctcggccagatgatttttgcggccgctctgtttattatcgccttgtttaactacaatctcattgccggctttatttgggataaaatgaatcggctgctgcgccacgattatttcgtccataacaattcgcacattacatatgccacgatgacggccattattgttgtgccgctgtttttccttttgtttacgttcttttatcataaaagatcgaagccgatcggagaaaaggccgatcctgaacggctgaagtcctttttggcggaagaaggcggaaacgcactcagccatctcggctttctcggggataagcggttttatttctcaagcgacggcaaagcgcttttattgttcagccagatttccagaaggcttgtcgtgctcggtgatccgtcaggacagagagactcttttccgcttgtgattgaagaatttctgaatgaagcgcataagcaggggctgagtgtcatgttttatcagatcgaacgtgaagatctggcgctgtatcatgacttcggctataacttcttcaagcttggagaagaagcgttcgtggatatggaggcctttacgctctcaggtaagaaaaaagcggggctgcgggcgattaacaacaaatttgaccgcgaaggctacacatttcatgtcggggaaccgccgttttcctccgagtttatcgccaagctgaaagacatttcggacgaatggctcggaccgaaaaaagagaaaggtttttctctcggtttcttcgaccgggattatttggaacaggcgccgattgcttacgtgaaagacgcggaaggggagatcatcgcttttgccaacctgatgccgatgtatcaggaaggcgagatatccgtcgacttgatgcgttatcggaaaagcgcgccgaacggtattatggacgcgcttttcatccgtctgtttctctgggcgcaggaaaaaggctataccaccttcaatatgggcatggcgcctttgtcaaacgtaggtacggcttttacatctttctggtcggaaagaatcgcggccgtcatcttcaacaacgtccggtatatgtacagcttcagcgggctgcgggcctttaaagaaaaatacaaaccggagtggcgcgggaaatacttggcgtaccgcaaaaacagatcgctgtccgtcacgatgattctcgtcacccgcctgatcggaaaaaccaaaaaaagacgccgttaaaaggcgtctttttttttgaagaattaactaaaaattctaatttcactctgttatactgaataacatgatcataaggtgaaaggaaggctgatgaatgaaacaggcaaccgtgtttaaatatgaagcgttttccaatattcctgatttgggaaatcccgcgggaatcgtctttaacggagatgattattcagatgaagagatgcagatgatcgccgaaatggcagggtacaacgaaacctcatttctctgtaaaagcggagaagccgatctgcgcatccgctattttacacccggccatgaaatgaatttatgcggacatgctaccgtcgcctctctttacgcattaattgaaaagggaaggcttcaggctgatcagacatatcaaattgaaacaaaagccggcattcttcccgcaaaagccgctgaacgaaacggccgggtatacatcacactcgaacaggctcccccgcaatttctgccgtttacgggcgacaaagaaaagcttgccgcctcgctcgggattacggctgaggattttcacagcgggctgccgattgtttacggatcaacggggatctggacactgattgttccgctgagatcacttaaagcatcacggaatatggtgccggacaacgcacaattccccgctattttgcgcgatcttccgaaagcgagcgttcatccgttttctctggaaaccgttcatccggaaagtgatctgcacggacgccatttttcttcccctttctccggaacgaccgaagatcccgtcacgggaaccgcttcaggcgtcatggcagcctatatgcggcaatacggaggctccgaagccgaatgcctcacgattgaacaaggccaggaaatcgggaaagacggaaaagtggaaatcaggatcgcggaggaaaacggagagatgaacatcaagatgacgggaacggccgtgtatgccgaaacaatcaattttcagcttccgtaacggtttacaaatgccggtcgtatccgttatattataaatgataatcattttcatttggataggaaggtgaatcggcatgccgaaaaccgaacaattacagcaaaacgaaagtcttgcacatacaatcagaaacagaagatccatccggtcgtttaaaccggaaaccgtaccttctgaagtcatattagatatgcttgaaacggccgtttacgcaccgaaccacagactgacggagccatggcgttttatctacgcagcaagcgaagcgggaaaagcaaagcttgcggacagctacgtctcatttttcaaaaagataaaagatgatttcaacgaggaaaaagagcggaacatgagaaaaaatctcagcgccgttccgggatttttgctggtcgtcttaaaagaagatgaaaatgaatttacgagaaacgatgatttcgcggcgctgagcggcatgattcaaaaccttcagcttctcgcacatgaaaacggcatcggcatggtctggaaaagcggccgcattatgtatgacaaacaggtgcaccaagacttcggccttgctgacaatgagcgctttgccgccatcattcaaacgggctatccggatgaacagcctaaggcgaaagaacggacgccggcaaaaagcctgtttaccgaactgtaaaaaaaatccccgtctctatacagaggcggggatttcgtattagcgggttttgcttttagctctgttgtcagcggctttcatccgcgcctgcgcttcgcggtcagcggaatcagcaagctcgcttgaatattcctcgtacgtgccgtctgtttcgcgtttcaaagcatccggaacttgaggaagtttttgtttgtttttatcacggtttttgtgagtatggtttctgcccatatcaatcgccccctgaaaaaagtgatatcaaacaaacatagtatctgcccaatcccgatctttattcagtttatttccgtttggctgctctttccgcttttttgaattcaccggaataaaggacttcctgcatttttttcagattggctccctgctgatgtttttcgcgcttcttttccataaaagaagaccctccttcaaaacagaataccaataggattggcttttatttccgtttttatgcagataagagatcctttaaagccaaatcaagttcttcatacgtaaattgaaaaccggatgtcagcgcctgcttaggcagggcgcgctggccttttacgatcagcaggctcatttctcccaaggccttctccagaaaaaattccggtacgggaatccaatgggggcggtgcaggacgcttgcgatcgtttttccgaattgcttcatttccacggggttcggcgatgtcacattcatgggaccggacaagtcatcatgctccgccgcataagcgataagttccgcggcgtcgtccacatgaacccatgacagccattgtcgtccagagccgacggtgcctccggctaacagcttataagggagaaccatgagcggcagggcgcctttttcaccgagcatcaccccgaatctggcatataccgtccggatgccgagcgcttcaattttctggccttcacgctcccatatatgagccgtatgactgagaaagtcttcatttgacgtatcggactgttcggtgaacgttttctctgtacttgtgccgtaaatgccgacggcgcttgcctgaattaaagcccggggttttttcggctgctgcttcataatccgtctgacttctctcgtcgcttctacccggcttgagatgatttgttccttcgttgtgtccgtccagcggtcaaagatggatttgccggcgaggttcacccatacatcaatagggggaagctcgcgctcaggcgccgcgttttcggccagccattgaacatatgtcacatttttttgttcggtttctctctgttttcttgataaaatatagacatgatgtccccggcgggtaaacacacctgtcagatgccggcccagaaaaccagtgccgcctgtcatcgcgatattcatatccatctctccttacacgttgatacatatactgtacctcatttgccaaaaagaaaaacgcctgaacatcggggcggaaaggagaccgggatgccgtttattacaaaaatatcgacccaaaagaaaaataccgagcgcttcaacatctttcttgatgagaaatatgcattcagcgtcgacgccgacgtgcttgtgcgttttgacctgaaaaaagggaaagaactggacgagtttgacattcttgaaatccagtacggcgatgacgtgaaaaaagcctttaaccgcgccgtagaatttttatcataccggatgcgctctgaaaaagaagtccgggatcatctgaagaaaaaagaaacaccggatatggtcatttctgaagtcatccataaactgtacgattaccgctacttaaatgacaaagaatttgcggaagcttatgcgaccacccacaaaaaaacaaacggcaaaggccctgacgtcctgttccgcgagctgaaagcgaaaggaatagacgacgataccatcaaggagacgctcagtgcgtttacatttgatgagcagatacaagaagcgctgaaacatatcggcaaaattctgaaaaaagacaaaaagctgtccacaaaagagatcagacagcgggcgcagatgcagcttcagcgaaaaggtttccctttcgacgtcatcaatgccgctctggagcagacggagtatgaaaatgatgatgaagccgagatggaagctctgaaggctcatgcggaaaaagcgatcaggaaataccgctatgacggcagttatgaaagcggaatgaaggtcaaacagtacttattcagaaaaggattctcgattgacaatattgatcaattcttgcaggaagaggagtaaactgaaatggacaaacgatacagtcaaatgacgcctcatgaactacagacagaaattgcgggactgacggaaaaagcgcgaaaagcggaacagatgggcattgtaaatgaactggccgtgcttgaacggaaaattacgatggccaaagcttacatgctgaacccggaagactttcggcccggcggggtgtatcagatagaaggttctgatgacactttccgcattgattacatcaacggcgtattcgcctggggacacagatcttccccgtctgacggggaagaagcactgccgatttccgttttaaaagaaaaaaaataacaaaagaggccggttccggcctctttttcttttcgggcacattcgtttcaacctttcagtaaaaaatgattgaattcatttttgatatcttttaagatggaattcgttgttttttaaataaaaaggaggcgatttgcgttgaatatcaaaatgaaacagccatcagtgaaattaatgatttttgttttaatgatttgcacattttccatcgggtatacggaatatgctgtcatgggtattctgacgtcgattgccgatgactttcatatacatgtatcttcagcgggcatgcttgttacggcgtacgcggcaagcgtctgcctgacgggcccgatcgtaaccattatcgcggttaagctgccgagaaagccggtgctgctagggttgatgggcatcttcgtccttgccaacctgatgagcgtctttgcgccaaacttcgccgtgctggcgatttccagaattttatccgcatccatccacggagctttttttgcgatcgccatggtgtttgcgagtgaaatggtgccgcctgaaaaacgttccgccgccgcggcttccatgaacggcggattaaccgtggcgctgatgctcggtgtcccgttcggctcttatttaggagatgcccttaactggcgggccgtctttttcattatttccgttttaggcatgatcgggctgatcggactgatgctggtcgtaccgaaccggaaaccgaaagtgattccgatgctgatgaatgaatggagtgtctttaagcataagcaagtgattttttcctttgcgatcaccattctcggctactcaggcgtatttatcgcttacacgtttattgagccgattttaagagattcagcggggttcggcacagtcggcatcacaggcgcattatttgcctacggtctcggcggagtggcggggaatttcttcgcggggaaagtgccgctcaaactgctgacacgcacgatgatcggtgtgatgatcggcttgatcggcgtcttggcgatttttccttatatcgccgtttttccagccgccgcggtttcagcgacatttttattcggcgcatgtgcgttcggcacgccgccgcttttgcagaccaaggttatttcttcctctgaaaacggcacgacaatcgccgctgcggtgagcgtttccgcctttaacctggcaaacgcgctcggcgcctggatcggcggattgattctcgggggaacgggatcttactcatggctgtttgccggcggtgcgctgatgacggctctcggccttgtgctttccacgttcgctcatctgtctgagaagaaagatgtttatgattaccaagtgcataaagggtaacaaaaagcttgcaggggatattccgcctgcaagcttttttcagtgcttcaatgtaatgctgatcaccgtatgtttatcactctcagctaaggacatattccgggtttccggtactccgtctttttcaaaaacgacggcataggttcctttcgcgccgcttttccatgcaatctcgccgtggtgatcagtcttgcctattatctctccgcggtctatattcggctgatgatctgactccgccgctttcatcacggtgaccgtcacaccggccgccggtgaaccgtctgcatcctcaacatggagcgtaacgggcaatgcttttttggcggcggaatcattcgctttgccgcatccgcataaaacggccgccgcgagaaagaaaacaaaagctttattgatttgaccaatattgaatgttgtcgaatacactgtttgtcacccttgttcccagattgtaagacgacccgccgtttgtatgaatcgcaatggcggtctggccggtgtcgctgtaattgcggtaaacgggcgatccgctctggcagccgtacgtatctgtcgtataagtgagtttatatgtctcggcagaacgaatcggcttgctgtccgaccacatggaaccggacactttgtcgcacggatatcctgtcacggttgaggaaagcccggccggactggaactgttggtcgtccggtagccgtaccagccgacagtattcccgggcgacccgtttactttgattgccccgtagtcgtagtttgtgtcaccgttttctgtccaccctttgacactgtagaatgtcttgcctgaataagagccgtacgggtacgatgatccgttgcggcccggagctgccgtaattttagatgcccagccgtttttctggtcatacacgcaatgtcccgccgtaacgatcgtgtcggcattgacaaaaaaaccggtgcatccgtaggtgcttgtgctgccgctgtatgtaacggtcagctgtgctgtcgctcgatatggaaatgatgttgtaggagaaattctgattcgttcgtctgtcccaataatactggaaggctttaatgacttgatgtcagctttgctgttttgtgcaagctgtcttttggtgaggcccgttccttcataagcgggggatgtctgtgttgtttgtacaggctgattctgatttgcgtcaaactcctcaccgctgtttgatacagatgtctgcgggctgcccgctgcttcagctgaaacagcaaataatgaaactgacagtaagaatgcggtaaggctcagcaatcgttgtgaaactgtcttcattttataaaacccctccttttttgtctaccggttttcgttttaacatttaacatattatggaatttatttagcgttatgaccgcaaaaggatgtttttttccgcaaaaaaaagaccgggtcattcccggtctcttacggtgtgtgttatcgtctgcctgaagctctcatgcgctcttgcgggtgcgaattaattgaaccgtccgcccgtttagaagcgtagtcatcctttgcccgcggttcgccttcaaacttattattgttctgattaggaaatccttttgccttgttccggaccatttgttttccccctcggccaatatcaaaaggttgcgccttctggactgaagacgtaaagttagtatatgcctgtgacaagctgcgtaaaagcagcaggttttcccaaggaaaggagacagagacatgaatacatatatcgacaaactgacgaatttgctgcttgagaaaaatgacatgctcagctatttgcaagcgcgaacttgggttgagcttttatggggagatttcgaagcgacttacgcaaaagccggccgcccgtatcaaggagagcaaatgacggaacgcgtggtcaaggaatggatcgaatcatacggcagcaagctccatatgttccagagcgtacgggaagacgtttctcattatttggatcaaagcaggggtctcctgcattaacatagcagttcgcccgccggataccgtccggcggttttttctttttataaaagaaataggaaaatcatgtttgacggcccgcggaatgtggaaatgtgtaataacttataaaatagcggggaggaaccacaatgaacatgaaaaaggggttaaccgcatttattccggccgcaggactttgcttatttttagccgcaggcaccgttttttttgatccggcagcgaatgccgcagcagttcagcagacaaaaatagacaccgcagcagatacatatatcgtgaaagcaggagaacttaacgtccgcaaagaaccaaataaacaagggtcgattatcggcacgcttcgttcagaggattccgtaaaggttaaacggcttcaaggagcagattgggctgagattgactacaaagggcacaaagcctatatctccacacattttctgatgaagcagccggtgaaggcggtgacggcgaaacaaaccgctttttatacgccgactttggaaaccggcaaaaaagggtccgttaaagcgggtgaaaccgtcaatgtgctcggctgggggttcagccatgacggagggtttgaccgtaaatgggcgtacgtcacatacggcgggaaagcaggttatgtgaaaacggccgacttaactcaaaaataaagattcaggcaggcgaatgagcctgctttttttctgaaaccttccgcctttcctttcgtaaaagatgaaaaggagagtgagggatatgataatggtgatcggcggccttctgatggctgcggccggcattttagtcacattttttccgccgaagtcgatcaacagcctgtacggatatcggacgaagcgctctatggcggatgagtcgcagtggaaagaaggcaatcgattcagtgcgcttctcatgattttgttcggccttatatcggcggcagctggatttgcgggcagcctgcttatccggctgactcagccgttcgccctgatcgttcaggccgtattattgattgcgatcagcgtactgatcatcgtcttaacagaaagaagattgaaacaaacggggaggagaatcgatgaatgacattacgtttcacatgatcgaaacaaacggagtgacgctgcacacggcttcaaccggtccgaaagacggtcctttggcggtgctgctgcacgggtttccggaattctggtacggctggaagagccagatcaaaccgctggcggatgccggataccatgttgtcgtgcctgatcagcgcggctataatctcagtgacaaaccggagggcattgaaaactataccattgatacgctcagagacgacattatcgggctgatcactcattttacagatgacaaagccgtcgtcatcggccacgattggggaggagccgtggcctggcatttggcatccacgcggccgcaatacgttgaaaaattgatcacggtcaatatcccgcacccggcggttatgcggaaggtcacaccgttctacccgccgcagtggaagaaaagctcttatatcgcgttctttcagcttccggaaaagccggaacggagattgtctgaagacgattaccgcgtattggatcacgcgatcggcttatctgaacgcccggcgcttttttcacgggaagatgtcgacagctacaaagaagcttggggcagaaaaggagcgctcacggcgatgctgaactggtaccgggcgatcagatccggcggtttaggccctgccgttccgcttaaaatgcccgttccgtaccgattaatatggggcgtcaatgaccgagcgctgagcaaaaagctcgccaaggaaacaaaacggatgattccaaacggcgacttaatcttcatagatgatgcctcacattgggtcattcacgaaaaaccgcgcatcgtcagccatttgattcatgaataccttcagcaataaagtctgtcccgcgtacagactttttcttttttttctcatatctgccgaaaaacatgacaaaatataaaccatatgcagaaaaaattttctttccctgtaacaaaaaaatggtttaaacgtcatttaaaaaaggaaaagccttactgaagttttgcggacaattcctttaaggccgtcctaaaaaaagaataatacaaagaaggtgccttcatgaaacaaaggttaatctcaattattattccgtcttacaatgaagggaacaatgtcaagctcatccatgaatctttaaaaaaagagtttcagacgattcattatgactatgaaattttctacatcaatgacggaagcgcggatgacacccttcagcagattaaagaactggccgccagaaaccatcgcgtcaaatacatatctttttcccgcaacttcgggaaagaagcggccattttggcaggatttgaacacgtgcagggcgaagcggtaatcgtgatggacgccgatctgcagcatccgacccatctgctgaaagacttcattcaaggctatgaagaagggtatgaccaagtcatcgcgcagcgcaaccgaaaaggggacagccccgtgcgttccgtgctttcttccctgtattataaatttatcaacaaagccgtcgaagtggacctgcgtgacggggtcggagatttccgcctgctgagccggcaggccgttgatgcccttttgaagctgagtgaagggaaccgtttctcgaaagggctgttctgctggatcgggtttgaccagaaaatcgtattttatgaaaatgtcgaaaggaagaacggcacgtccaaatggtcattcagcaatctgttcaactacggaatggacggtgtcgtctccttcaacaacaagccccttagggtatgctttttcaccggtattctgatattgcttctatcgatggtttatattgtaacgacctttgttcatattctgacacacggcgtgtccgtacccggatacttcaccattatttccgccgtgctgtttttagggggcatccagcttttgagtctcggcatcatcggagaatacatcggccggatttactatgaaacaaaaaaacgcccgcactatttaattaaagaagcgaatataacgtacggagaacaaaatgaaacgaattatacaaaaaagcgcaagtggaaccattaaacaggcgccgctgtgcgcagggtctggggacgttgtatgaaaaaaaataaatggatcttgccggcagcctgtgtgctggctgcggcagccgctcatatttttttcttaaaagagtggacgcaaggccgctatatgacggggtctggagacgggatcgcccaaatggcggtcttcaaaaagctgctgtttgatcaatatatgaacggcaggctgttttacagctattcgttcggactgggcgggggcgtgtacagtcagctcggctattatttctctacttcttttctattcctgtttatctccgccgctgtccgctttttgcagcttattcagctgacgggtgaggctgatgcgctgttttgggcgcaggcctccgtttttatcagcattgtcaagcagagttttatcatattcacggcagcgtgtgtgttccgttatttcgttaaacggacggtgcctgcttttgcgggcgccgtgttgtacggggtctcgattatttacttccggcatgaggtatattgggactttttcactgacagtatggtgtggctgccgttgcttgtgttgggcgcggaaaaaatcatccgggaaaaaaagccggcgtggtttatcttcgcctgtgcgctgacattgatcaacaacttttattttgcgtatattaatctaattttcatcggcgtttatatcttattcaggtgggtgatcccccttgaaggcaatgaggcggaaaggctcactcaatgcaggatatttattctgtcgggccttctcgggttcggcataagcgcagtttcctttattcctgtcgtatacggataccttcataatctgcggcctccgtattcagagcatattgcatggcttgatttttccgacaacattttattttctagccggataatcatcctgccggcggcttttttgctttttctatttacatttactttatacaaaaaccgcttgttccggctgtttgcgggaatcagtatgctgtatattctgtttcacttcagtccgttcgcggcaagtgcctttaacggtttttcagctccgcagaacaggtttgaatacgtcctgtgcttcacgattgccggaacggtttcagccgggctttctaagctttcagacatcagcatgaagagtatgctgatgtccgccgtactcgtcgttctgctctattggagccaggtgaggcggtacagtctggatatttctgatcacgccaacctgcccgtcatccttcttctggtgctgagcatagccgctttctttgcagcaaagacaagactgaaaggcgcggtgcccgccgtctatgccgtcattttgcttacggcggtgcttacggctaatacatatgaaaaatatgctttatcagaaggcgggaagatttatacggtatcgcatacatttatgacgggtgctgactataaaggcaaagagcaatcagagctcattcagcgcctgaaagaaaaagaccctgatccgtttgcccgtttagattggatgaacggtgttttcaataacaccccgatcatatacgggttcaacggattcagcgtatactcaagtatactgaaccgcaatctgctgtccttttactggcacgacctccagattgacatgggcagagaaagcgtcagccgctatgcgacattaggaaacagggctaatttatacagcctgctttacggaaaatattatatgacggaaaaaacaaacgaggccggcgtgccgtacgggttcaaaaaaatcatggaatcaacccattatgcggtttatcaaaatcaatatatgcttccgttcgtacggacagccgatcgcgtatataacgagggcggcctgaaaaaagcgcccgcccttgccagggaacgggcaatgcttgacgggatcgtcatggaatcaagcacaaccaacacgaaaaaagcgactgaggcgaaaaatatgatccgccatgcagaggtagcggccgaacatggcgattatcataacggcatcctgacggtaaacgaagacggcggcggcctgatcattacgccgcaagccgctaagatggacggcggcgattattacgtcagcttttatttgaagaataaagcgaaggaccagggctttacattaaaagtgaacgattacacgacaacgagaaaatcgaatcaatccatttacaaaacaggtgtcaacgatcttactgtcagagtgccgaaaacaaaaaacatccaaatccgtctgccgaaaggatcgtatcagcttgacagactggcgctttatgaagaacgatacgatacgctgaaaagcgcataccgaaaagcggaaaaagaactgcgggccgatctcagctggcgcggaaatacgcttcatatctcgtatgataacaaaacccgcgcgccgtatatcatgcttccgattccatatgaaaaaggctgggagctgaagataaacggcaggaaagagcagattaaaaaagcggattattccttcatcggatttaaagcgcaaaaaggaaaaaacgatattcaattaacgtattacccgccgttttttaaacccgcggccgctctatcggtgatcagcctcgtgtttgcggctatatatgtgagaagacaaaaaaagcccggctcttaaacagagccgagttttaattttttctgcaatttttcctcgctgaaaatccagcccgtgtaagaagagagaagctctaaatcatgactgaggtggacgatggcgacaaaaggatagtggcctttgctccggtagcgtaaatcaataaaacgcacctcataatgatctttaaaggtatcgacctcccacctgtaaacgggggaaaatgaaagaaaggctgcaatattttcgtcctgttttgcggccttcattacatcggtttcaggaacgggcacgcggttgaatgtatccaatatcacgacatggccgtcaaggcttctgccgacataaaaggcatgcgccgtcgtcacggcgatacgccactgcctgaatttcatcgtcggcgaaataatgatggtttcaatctcctcttcaatcatttcgcgcagccttcgctttatccgcagctgcatcaaaaaccggacggcgtaatatcctgtgaggatgatataaagcatcagaaatgtcacgcccggatgacctccgatataccacacggcaatcgcggccaaatggctgacgaaaataaacggatcaaaggtattgattaaaccgagagcgatccattttctcgaaaacgggcggatggcctgcgtgccgtacgcgttaaaaatgtcaacaaacacatgcaacacgacagcgaggagcgtccacagccacaggtgcaaaaagttcgcttctggataaaacataaacaaaatacccggaatcagaacggaccaaaataaaacggcgggaatggagtgcgtgaaccctctatgatttcgaatataaacggcattatttttcagcttcaatatggtatcaatatcaggtgcctgagagccggcaagagcggcaatcataactgcctgagacatgggggtgtgcatgccgacggcaggatcaagagttgcgattccgccaagcgcgatacccatgacaacgtgagtgccagtatccattgttgacctcctagcaggcgttaacaatcagtcgcccgcatatttcgcattataagatattccccattttctgtttgcccaatcatggcgtttatccgccgttctcatatgtttccgctttttctttatcactatttaatgtaacatattatcgtaacgtgccctaagtttacaccaaaatacggtgtcaagaaaagcggaacccgaaacatctgaggagaagatatgaacgcacttgaagaaaaaatgaaacaaaaagatatagacaaatttcgcgaggacttaattacatggttcgaaagagaacagagaattctgccgtggagagaaaatcaggacccgtatcgggtgtgggtgtcagaggtgatgctgcagcagacgcgcgtagaaaccgttatcccttatttccggcggtttgttgagcaatttccgaccgtttcggcgctcgctgaagccgatgaggaaaaagtgctcaaagcctgggaagggctaggttattactcccgtgtaagaaatctgcaaagtgccgtaaaagaagtgcatgagcggtacgggggagtcgtccctgccgaggaaaaggaatttggcggactgaaaggcgtcggcccttatacaaaaggcgccgtgctcagcatcgcatacaacaaaccgatccccgccgtagacggcaatgtgatgcgtgtcatgtcgagaattctttccatatgggacgatatcgcaaaacctaaaaccagaaccattttcgaacaggcggtatccgctttcatttctcatgaaaaaccatctgaattcaatcagggtttaatggagctcggcgcgatcatctgcaccccgaaatcgccgtcctgcctgctttgccccgtacaaaagcactgctcggcatttgcggaagggacagagcgggagctgcccgttaaaagcaaaaagaaaaagcccggaataaaaacaatggcagccgttgtgctgacagacgatcaagacgatgtctatattcataaacggccgccaaaaggcttgctcgccaacttgtgggagtttccgaataccgaaacccagaaaggaatcaaaaccgaaagagagcagcttgaagcctatttagaaaaagagatgggaacaaccgctgaaatcggggagctggaaggtatcgtagaacatgttttcacccatctcgtctggaatatttcggtctttttcggtaaagtaaaacaagtgtcggatacaacggaattcatacgggtcacaaaagaggagctcgaggaatacgcatttcccgtttcccatcaaaagatatggaaaatggcggaagaaagcggccgcctgtaaaaagcgtcagtcatagctgacgcgagtgccgtggccgtaatccgcttcattccgtttcagtccgccgcgggcttcgatttcctgaatcagttcccggtatttggactggccttcttcgtttaaatacggcataatttgctggaaggcatgatggaaataggcgagctctgaatctctccaatcttttttgggcatcatggccaattcgcccatatcacgtccgacatacatataaaagacccctttcaacacatattgcttttattgtttgttgaatgaaaagaactatacacagcaaggagctgaggaaaaatggaacaaaataaatgcgcactgatcacgggaagcagccgaggcgtcgggaaagcagccgccatcagactcgcggaaaaaggatacaacatcgtcatcaattacgcccgcagtaaaaaagcggcattagaaaccgccgaagaaattgaaaaactcggcgtgaaaacgctcgtcattaaagccaatgtcggccagccggcaaaaatcaaagacatgttccgccagattgacgaaacattcggcagactggacgtgttcgtcaataatgcggcttcaggcgtgctgagaccggtcatggaactcgaagaaacacactgggactggacgatgaatatcaatgcgaaagcattgcttttctgcgcccaggaagcagcaaagatgatggagaaaaacggaggcggccacatcgtcagcatcagctcgctcggcagcatccgctatcttgaaaactatacgacggtcggtgtctcaaaagccgctttagaatcgttaacccgttatctggcggttgagctttctccgaaaaatatcatcgtaaacgcggtgtcaggcggagcgattgatacggacgcgctgaagcatttccctaacagagatgaactgctggaagatgcccgccaaaatacgccggccggcagaatggtcgagattaaagatatgatcgacacggtggagtttttagtttcttcaaaagcggatatgatccgcggccagaccatcattattgacggcggacgctctctgctcgtataagtttaaaaaaagatgaatagccttatcgtctcctgcgcattctaaagtgcgtggaggtgataacaatggcaaactcaaaatacagcaaaacagacgttcagcaggtgaaaagacaaaaccagcaatcagcttccggtcagggtcaatacggcactgaattcggcagtgaaactgatgcgcagcaggttagaaagcaaaaccaatctgctgaacaaaacaaacagcaaaacagctaatcactgaaacgaaaaagcacttcatcttcggatggaagtgcttttttctgttgccaaaacgacaaaacttgtgattcctctacagaatgagtcaaagggttttccggcgtaaaatcgaaatggtaaggagtatcaacctaaaagcctaaggaggaacccgatgtcagagtttgaaaagcttgtaagtgaacagatgaaaatcatggatcagcttctcgagctgcagtcagaacttgaccgctgccgacaggtggaagcggaactcatcagtctggaaagagatgcaaagctggacaatgtacaggacgaaattgcgacaaagcgaaaagacctggccggcatacaggagttattccaaaggcagacagagcaagtcatccagtcttatcgcagcacggaaaagccgtcttcctatgtgcagaaatgaatgtgccattccggaagcggagtggttcttttattttcattttttaattcgtaacgttataatagtgaaaagacttgtcggaaagcaattgcggctgcattgactgcagggctttacagaaagtaggggagaaatatgggatatcccaaggaaggagaaaccattcaaattcacagctataagcataacgggctgcttcatcgaatttggaatgaaacgacgattttaaaaagtacggaattgtgtatcatcggagccaacgaccggacaatggtgacggaatccgacggacggacgtgggtgacgagagaaccggcgatctgctactttcatgcccgtcagtggtttaacgtcatcggaatgctgagagatgacggggtacactattattgcaacatcagctcgccgttcgcttatgacggagaggccatcaaatatattgattacgatttggatgtcaaggtgtttccggatatgacgtataacattcttgacgaggatgaatacgatgaccaccgcaaatcaatgaattaccctaaagagatcgacagcattctgaaggagtatctgaatacgctgctgcactggattcatcagcggaaaggaccgtttgctccggaatttgttgatatgtggtatgaacggtatctgcgctatacaaaataaagaatacaataaaaaacctgttggggtgtcaacaggtttttcacatgggctcacacgccttaaagagagagggggataaagtgtgggcgtaatcagacgctatatgcaatttgtaaaaccttataaaaaacaaattttaatcacagtgttaatcggcatcataaaattctccatcccgctggctctcccgcttctgttaaaatacgttgtcgatgacattattcaagggagcggaacggcaagcgctaaaacatcatcgctattcacgataatgggcatcatgttcgtgctgtttttaattctgcgtcccccggtagagtactatcggcaatacttcgcgcaatggacgggcagccgggtgctctatgatatcaggggagtattgtttgatcatattcaaaaattgagcctgaggttttatgccaacacgagaacgggcgaagtcatttcccgggtgataaatgatgtcgaacagacaaaagactttgtcataacgggactgatgaatatctggcttgatatgatgacggtgctgatcgtcatctgcattatgtttacactcgatgtcaagctgacattgatatctgtcattttgtttccgttatacggaatttcagtgaaatacttttacggccgtctccgaaaactgacacgggagcgttctcaggcactcgcccaagttcagggacatttgcacgaacgagttcaggggatgcccgtcatcagaagttttgccattgaagattatgaacaagccaattttgatgaaaaaaacggacattttctggacagagcgatccgtcatacgaattggaacgcaaaaacgtttgcagtcgtgaataccattacggatttggcgccgctgctcgttatcgcgtttgcgggttattttgtcataaacggtccgctgacggtagggacgatggttgcgttcgtcggctatattgacagaatgtacaatccggtcagaagattgatcaactcatcgacgacgctgacccagtcgatcgcttcaatggaccgcatatttgaatttatcgacgagccgtatgaactgactgataaaccgaatgcagtaaaagctgacggcattaagggcgaagttgaattccgaaatgtctcgttccgttatgaggaaggaaaagaaacgattttgcaggacgtttccttaaaggtgacaaaaggggaaaccgtcgcgctcgtcgggatgagcggcggcggtaaatcgacgcttgtcagcctcataccgcgtttttatgatgtatccggcggcagcctgctgattgacggcacagatattcgcgattatgaagcgagaagcctccgcaatcaagtcggaatggtgcttcaggatacgtttctgttcagtgagacgattcgtgaaaatatcgccatcggtaaaccgggagcgtctctggatgaggtggttgcggctgcgaaagcggcaaatgcccatgaatttattatgaatttccccgaaggctatgaaaccaaagtcggcgaacggggcgtcaaattgtcaggcgggcagaaacagcggatttccatcgcgcgtgtattcttaaaaaatccgccgctgttaatcttggatgaagcgacatcggctcttgatctggaaagtgaacactacattcaggaagcgatggaaaagcttgcgaaaaaccggacgacatttatcgtcgcccacaggctgtccacgattacgcacgcggataaaattgtcgtcatggaaaacggcgctgtcgtcgaaaccggcacgcacgaggaattaatggcccaaggcggccagtacagacacttatttacgattcagaatttgaactgatacaaaaacgtatgccgtccgaatgggcggcatacgttttttttaatgcaaaaaaacccggttatctagagcaccgggttactcatcatcgtctgtttctaattcgctgtctttcgggtggtatgtctgaaaactcgtaattaatgtatcgagatgctccagctgctcgcggtattccgcaaccgcagccataatgctgagcatattgtaatcaagcagttcatcctcgcagttctgctgatttttcaagaaagacttcgtcaaaagctgtttatatcttatgctttcttcagcatcgtcatcatgcggtttgatcttgccgaccgtccgcatcagaatcctttcgtgccaatgaagcagataatcaatttcttctgtcagcgtctcctgaaattcctccggcatatgataaatctcgttttcatagcggtgcagctttttcagcgtatcaagcgcccgattcgccgtaataatcgcctgtctgaacaatacaagcttgcgcgactttacatacgtcgttttcttaaagtagcttctctcctctttataaagaaggtacgtatgatcaagcttcatcatcttttccttcagcttctcaatatcctctttcaatatcgagtgttccgtggactgacgcatcgtcagcctgatccatttcatgatctcatcggtatattcaaccgtatgatgagtcagcttcgtttcgtatttcggcggaagaaacacaaggttcacaataaaagaagacagcacgcctaaaataacggtgcttgttcgtatcagagcgaacgtcaggaagctgtttcccggtgtttctaaaattgcgataaccgtcacgagcgcaatcgaaatggtgtgttcaattttcagttttaacatgatcgtgatgacaatcactgcggtcaatccgatcataatcggactcggtccgaaaatcagtccgaatgccgtagcgatgacagcgccgatgatatttgcctgaacctgatcaataatgataagaaaagacctgtaaatagagggctgtatggcaaatatagctgcaatcccggcaaagatcggcgacggaagtccgatccatgatgctaagtagagcgcgagcgtaatcgcaatccctgttttaaaaatgcgggcaccaagtttcattggtttgtgcgtgcattcctttctctaataaattatgtgccgaacgaacggctgacacttacatttccctgtcggctgatttgctaaacaataaagtaatatacagggatcataccaattattcaaggtctttttttgaaaaaaccattatctcacaaatcggacaaaaagaaaaagcggaagccccgggctcccgcttgtttcagcagttattttttcatatgtctgaacgcatcttcaacggcttgtaaagtggcgtcgatatcctcttcagtatgtgcggttgtgataaaccaagcttcatacttcgatggagcgagattgatgccgcgctcaagcatcagcttgaagaacttggcgaatgcttctccgtccgtattttccgcctgctcgtaattgacgatcttttcatcagtgaagtaaaccgtgagcgcgccttttaaacggttgacggtgatggtaatgccgtgtgtctccgcatgggcgagaatgccgtgctcaagtctggcgccgagctcatcaagccgctcataaacgccttcttccttcagcacttccaggcaggcgatgcctgataggatagatgccgggtttccggccatcgtgccggcttgatatgccgggccgagcggagcaacctgctccatgatctcttttttgcctccgtaagcgccgatcggcaagccgccaccgataattttaccgagcgccgttaaatcaggcttcacttgaagaagatcctgcgcgcctccgtacataaaacggaacgccgtgatcacttcatcataaatgacgagcgcgcccgctttatgggtcaattcatttacctgttctaaaaatccttcttcaggttcaacgatgccgaagttgccgacgatcggctcgacgagaaccgctgcaatttccgaaccccatttatccagcgcggctttgtagctttcaatatcattgaaaggaacggtaatcacctcattggcgatgcttttcggcacgccggcggaatcaggagtgccgagcgtagacggaccggaacccgcagcgacaagtacaagatcagaatggccgtgatagcagccagcgaatttaatgatttttgtccggcctgtataagcgcgtgcaacccggatcgttgtcattactgcttcagtgcctgagtttacgaatcgtactttatcaagtgaaggaatggcctccttcagcattttggcgaaagtgacctcatgtttggtcggcgtcccgtacagcacgccgttttcagccgctgttttaatcgcttcagtaatatgcggatgggcatgtccggtaataatcgggccgtaagccgctaaataatcgatatactgattcccgtctacatcccagaaataagcgccgttcgctttttccatcgcaacgggtgaaccgccgcctaccgctttataggatctggacgggctgttcacgcctccgacgatatgctctaacgcttccttatgaagttcaactgattttgtatacaaaaaatgaccctcctaatatctccttacatcatgttctattgtagcatgcttcattgcgagcacaacggttcatgcttccagaaaagagcgggaggataacggttgtaatcttaacgtgaattggatacgcttaataaaaaacccggaggtataagaaatgacgattgaaatcggacaaacagcaccggatatgaaattagtgaatgacagcggggaagaagtagcattgacggattttaaagggaagtacgtcgttctctatttttatccgaaagacatgacacccggatgcacgacggaagcatgtgatttccgtgatcagcacgaaagtttcgcgggacttgatgcggttattatcggagtaagccctgacagccgtgataaacatgaaaaatttaagcaaaaacacgatcttcctttccagctcctcgttgatgatgagcacaaattggcggaagcttttgatgtgtggaagctgaaaaagaattttgggaaagaatatatgggtatcgagcgatccacttttttgttagataaagaaggccgtcttgtgaaggagtggagaaaggtaaaagtgaaagatcacgttgccgaggcgcttcgagaattggaacaaattgcgtctaattaatggacaaatgctgaactcacggggttttcttcagattacatttgacaggagaccggaaaaagatgtacactaattataaacattataaagtaagaatcttttttagaagagaggtgcatgacggatggctgcacatgaattaaaagaagccttagacacgttgaaggatacgggagtccggattactcctcaacgtcatgccattctggaatatctcgtggattctatggcacatccgacagcggacgatatatataaagccttggaagggaaattccctaatatgagtgttgcgacagtgtataacaatttgcgtgtattccgggaagcggggcttgtaaaggaactgacgtacggagatgcgtccagcagatttgactttgtcacctctgaccattatcacgccatttgtgaaagctgcggaaaaatcgtagacttccattatcccgggcttgacgaagtggaacagcttgcggctcacgtcacggggtttaaggtaagccaccaccgtttggagatttacggcgtctgccaagaatgttccaaaaaagaaaaccactaaacgaagctgaccgctttgatacggtcagcttcgtttattttacactgttttttctgttataagactcatcgaacgctttgccttccaatcctttatccaatgtaagcggctctctgcaatgcatgcacatatccactctgcccagaatcttcgtttctttctcgcaagcggggcacatcacccggaccgcttttgtggacagcatgccgatccaaaaataaacggcggtgctgagcccgatcgacagcaggccgagaatcataaacaagctggcaagcaaaacagactgcttaaagaacagcccgatgtacataatgataaacccaacgaaaaccaaacttaacgcaaacgttctgatcttattaattttgcttgagtatttcgccatgtccatccccctctcgtttaactatagcacaaaacagatggcatattcttcatgttttcgtaagaaaagggaagaataaatatggcacctgaaaggaaatttgttataatagtgcaatgtgtttagaaaaaaggactttcatgttttatcatagaaatgtagaaacaatagctagtgaaacaatcgcattggaggaatcgtaatggacaatcttctccgtccaatttaccaagaaagagcaagtcatcccgatacgctggccgtccttatgattgaaagaaggagtaaagcatcatccatcacggataactttgatgcggtcatgcttgtcattgtcaaacaggctgatgaacctctttttataaagcattatgaattcgaacacaaaaccgcttctttacatattgtaacggatgctctgcttcaggaatggattctgcttgggaccaatagaagagtcatagattggatcatcaacggcaaagtactgtttgaccgcaatgaatatatatctgaactcaatgaccggctcagcacttttcctttcgccgagcggaaattaaagatcggaatggaatacggcaagctgatcagaagatttgtagaaggaaaagcgttttttgaagctgatcattttctggatgcatattatgcggtagtgcatgctcttcaccacttggcccgcatagaagtgattgaccgggggttttatcccgaaacgaccgtctggaaccaggtccgtcacattgagccgcaggtatataagctatattccgaacttgtcgagagtcacgaaagtttggagaaaaggctcgaattattattcttagcaaatgattttctcatccattcaaaagctgaaatcggttctgcccacctttttcaagtgatgaaagaaaaagaaatgtggcagtttggagaattgcttcagcaccctgaactggtgcacttcacccaggatcttggtgtcatgcttgattacctgacggaaaaaggctttgttgaagtatctcaaatagagaccaaagggcaggaagtatatcatcgaggatattctttcaaaaaaagtgttgacgctgaatcataggcatggtatattattaaacgtcgctgatgcgcttcaacaaaaagctcacagcggcggagaaataaaaacaaaaaaacatttgacagcaactcgctgaaatgttatactgaaaaagtcgcctcgagatgaggttgaaatgatctttgaaaactaaacaagacaaaacgtacctgttaattcaaagttttaaataaatcgcacagcgatgtgcgtagtcggtcaaactactttatcggagagtttgatcctggctcaggacgaacgctggcggcgtgcctaatacatgcaagtcgagcggacagatgggagcttgctccctgatgttagcggcggacgggtgagtaacacgtgggtaacctgcctgtaagactgggataactccgggaaaccggggctaataccggatggttgtctgaaccgcatggttcagacataaaaggtggcttcggctaccacttacagatggacccgcggcgcattagctagttggtgaggtaacggctcaccaaggcaacgatgcgtagccgacctgagagggtgatcggccacactgggactgagacacggcccagactcctacgggaggcagcagtagggaatcttccgcaatggacgaaagtctgacggagcaacgccgcgtgagtgatgaaggttttcggatcgtaaagctctgttgttagggaagaacaagtgccgttcaaatagggcggcaccttgacggtacctaaccagaaagccacggctaactacgtgccagcagccgcggtaatacgtaggtggcaagcgttgtccggaattattgggcgtaaag

SEQ ID NO: 11 - DNA, 103735 bp, Bacillus methylotrophicus
ccttttccgtaagtgtattgctttccaacaggctgttcgaatcgatgtgtatcaccagccttataccatctaacccatgtctgaacctgtgtcttattcttaatattcaactcctgcaggatctctttcataggtacgcctgccaatctcatttctacagccttctgtttcacttcaaccggataactcactcttgtccccatagaaaaaacacctccaagtctaatttcggataacaatcatccgtattcaaacttgaaggtgtttttatttgtctcatcttatggggtcagtcccccagggcaatgctctttttattttttctcctcatacggcaggacaaacagcggtttatcgggcttccattccgcatacagcacgtcctccgttcttttgatgttcagctttttcagctcctgagtcagctgcttttcttccagcccggcttctttcagattttcatacagcacttcgccgtcaataatcagcgtgaccggcaaagagacctgcttcggctttatttgcatgtcgccgtttttcgtcgtgtcatattgaaatttcggcaggacactgaccatcccgtttgtttctaaaatcgcgtactccgcttcctgtatggaaaagcaattcgcctgtctgagaaggctttgcaattgattaatgtccagcttattctttttcagcacatcatatttcagttttcctttatgtatgataatactcggctcgccttccaacagctttctggagctttttactttctgcgtaatcagttcgatgagataaattaaaaccccccataacagagaggcaaaaatgatttcaaaaatcctgacgcctttatcatacaccgcatttccgaccagttcgccgaggatgagcgcggaaataaaatcaaacggcgtaatttgcgagaattgagtttttccaagcaattttaaaatcacaaataaaatacccaaaccgcatactaactcccaagccactgtaagtaaatgtcccatattcgcaccttcttcttaaaagtcattaccattatggacattcgcctgttttctatacagcggccggcaacacacaaaaaaacgcagccgaggccgcgttttttcacttctgcttactgtttttgattcgatctgacgacccgtaagcacacctcagcggcataaccggcagccgctccggaacccgcaaacatcgcggcaagccccaagcccattccttcccagccgccgacaccgaaaatgctgtaaacaaccgtaccgaaagcagtcaggcccagcaccgccaaaaggcactcaggccacatctttttcggccatttcttgcggagcacagccgatacggcaaagttaagacaaaatgcggccagacagatcagaaaaaaaaaccccatgtcttttgcacctccgtcatgagtagctttttatttgctcacctttttttcaaacaaatgataacccggcgcgggtccttttgattcgtaccccattccgctgtaaaacgactgaagcgccttgttttcggacacgcaatcgagccggattttcgtttttcccggacaagacacacccgtctccgcccaagtcatgattgtccggccgagccccgcccctgcaaaccgcctgttaatcgccagccggtggagatatacggactcctcatgtccttcatcgccccaaagacgtctgtcccacccgcttgcttcgggaagcagcatgacgacgccggccagctcttcattctgcctgaataaaaaaacatacccttgggcgatcgcctcccgcatattgtgggtatcttccccttgcagaaggccgctccactggttcgaccctttatcgcgaagccattctgccgcttgcacgagcagatccatgacctcttttgcatcatctttccgggcgggggtgacccggaatgcccccgccgtctcctccgtaatcgtaaaaggtgtcataaaatcctcctgtaatcagaatattcgacacctttattatagaccaaacgcagaaaggaaaaaaacagccgtcgtgtttgagggccgtttaaaaaattttcttcttatcacgttcttcttttaaaatctcaaccgcttccctgaaacgcatagagtggacgatttcacgctcacgcagaaaacggagtgaatcattcaggtcaggatcatcggaaatatcaataatccattgatacgtcgctctcgccttttcttcagccgcaatatcctcatataaatcagcgatcggatctcccttcgcctgtatgtaagacgctgtgaacggaactccggccgcattgtgataaaacagcgcgctgtcatggttgacgtaatgatcactgagccctgcatcacgcagctgctccggggtcgcatcttttgtcagcttataaatcatcgtcgcaatcatttctaaatgcgcaaactcctccgtgccgatatccgtcagcaggccgatcaccttgtcaggaatcgtgtagcgctggtttaagtaccggagcgctgcggccaattcgccgtccgccccgccgtattgttcaatgagaaacttagccagcatcgggttgcatgtactgactttaaccggatactgcagctttttttcatatacccacatttacagatccctccttatacttgccatggccaaggaccgcggccccagtcccattgagcgccgacctgactcacgccgaattgcagaagcggtccgtactcaggctcaaaccgctttctcagctgtcttgagtaccgggaatattcatgaaactgctgaagcgcgagacggtcatggggatgcgtatccagataaagcgtcaactccaccaagacaaagtccgccgcctgaatttgctccagcagccgataatattcatcatcaatctttttcgccatattcgattcccccccgataaggattatcatagaaatcgtaaagatccttccaaagggtcccttttctcaatgcctccatcggagaaaactgctctaagtgatacggctgaaaccgcatataaagatgcggcggcgttctgaagtattttctcccgatcggcgggcagggatcaaaccggctgtggaagggtttataggatttgaccggtgtaaacggctgattttctttcattacgatcctcctttcctaaacacatgaccttaataggtatgaatccgtatcggcatttatgccctgtaagaaaataaaaaagcccgttaaaaacggactcaatgtaactcatctggaatttgaagtaaaaaaatcataatgaaaaatctgattgaaagcgctgataatgtttcaatgtatattccgtaatttgttgatcatattcaggatattcatatctcaataaaacagccactgactttgaatatgctctaaagagaccctggcagtcaaacaatgccttccacacgccttcataagtattgccgacataagtattcagcagaatttcccaatctttcgcattcatgtaatgttgaatatacttataattcttccctacacttaatgaaaactgattctctatcccgatattccacgcaatcatacgcaaaacattaggccttaaaatgtcattcatatgatccagcgcaaacagtatttctttacgcattaatcctttaataacataggttgaaaccatccaaaattcattgcagcaatcatcaaactctctgggggtcggtttctttatatgatattgttcatcactcacaataatcttactgttgattcggtgatccttgtctaataatatttccgccaaaccatcactctgtgtaaaataagcctctgtttgactcagagggatcaaagttaagtcgattctatgatgatctttaaaaagcattagataggagaaccagtctccgagttccggagggaaaagttccatatcttcaggtttttgcatcatcattctttcgccaaactgatccagccagctttcgtcagatgtgaaagagtccatatcggtcacaaaataagaaatatcatagtcttgaaatttgtctctcggtacatttttattggttcttgatccctctaaagtgacaagacggattctctcgtccttcatcgcaatatcaagaatcaatttcatcatttcgccttcacttctcacatggaaaacctcccgataaagagatttttacagatcatgcttttcagtttataaacaacttgctcatgatttacagaaaagtcctatgtacttgatgattttgctccaatcgtaacacagctgcaagaacatgagaagagcactcttgctgttccaagagtgcttttcccgaatggtcagatatattggctgtcccgatgatgatgatgatgatgatagaacgggtagccgccgtagccgccatagccgccaaaaccgtaccccggatatcctccgtagcctccgtagccgccgtagccgccgtagccgccaaaaccgtaccccgggtagccatagccgccgccgaaaccgtatcccggatatcctccgaagccgccgtagccaccgtagcctccgtagccgccaaaaccgtaccccgggtagcctccgtagcctccatagccgccgccatagccgccgccgtaaatcggtcttctttcattcatgatttatcgctccttcacataggttacagtccagtttatgacatgcggaaggaaacgtatgggcatccgcccagttttggcgaaataatcaataattgcttacggagaaatacgatacaggccgaccgcataagcaaaataaaaaggccggaacttatgccgccccggcctttttgtctttattcgcctaaatctacattgtgataaacctgctgtacgtcttcgaggtcttccagcacatcgatcagcttttcaaattgagctttcgcatcttccgggagctcgacttcattttgcgcaagcatcgtcagctccgcaaccgtgaactcttcaacgccggcatttttgaatgcctcctgtacggcatggaattgatcaggctcggcatacacgataacactgtcatcctcttctaaaatatcgcgcacgtccacatcagcttccatcagcaattccagcgcttcatccgccgtcttgccttcaacgccgataacggcggtcgcatcaaacatgtaagcgacagacccgctcacacccatatttccgccgtttttcccgaatgcggcgcgcacttcaggcgccgtgcggtttacattattcgttaacgcatcaacgatgatcattgaaccgttcggcccgaaaccttcgtaacgcagctcgtcaaagttctcctccgcgccgcctttcgccttttcaatcgcacgctcaataatatttttcggcacgctgtacgtcttcgcacgctcaagcaccacttttaacgcctggttcgattccggatctggctcgccttgttttgccgccacataaatctcacggccgaacttcgcgtaaatccggctcgtatttgcgtcctttgatgctttcttttctttaatattgttccacttacggcccattttgttccactctctttcacgaattgaatctgtatgataaatactctgcttctattatacctcagcggttgggttgtttcgagtgtaagacattagaaaaaacaggcacgcttaaactcaccggagcgcagtaagccgaatgtgagggttattgtacaaaacataaaaagcctcccttcatacaggaaggaagtcgcaagccaaaagattcattttattcttattacctatttcctacactgtatatcctgactcacgtggtaaaattttgatatcgaacaaaagaaaggatatgatcatgaaagttttcgaagcaaacaccctgctggccgccgccaaacagcgcgcgggtgaatacaaaaaactgcgcggtcaaatggttaatctgaaaaaagcgtttcaaggtatggctgatcttggtgacggcgatttctccggccggggtgccaataatatcaaagcctttttccaggatcacgccggcgtcacagacagctggcttgatctgatcgacatgaaaatcgcatttctcacaagccttcccggcaaggtcgaagacgccggactttccaattcacatgtggaggaatcatttctggagcacgagctcacccacgccctcagtaaatcaaaggcaattatggaagagcagaaaaaggacatgcgctccatcctcggagagatcgaagacatcatctcgcttgatctaatttcaacggaaagcacagatcagaagctttcttcagctgacaaaaaaagaagcgaaaccatacataaactcggcaagcttgatcacgatctaacgaaagaatacgcagaaaccgaagcaaatgaacattttatccaagcagatttccagcagcttcaaaacgcaacaggcaaaggaaaaagcgccacgccgcttcactacaatgccaaagcgtaccgagaaagcgacatccataagaaaaaaggcgatatcgcaagacattcggatgcttatttgacgattaagaaggaagaggcgaaagagcgagagattgaaaaactgaaagaaagactgaaaaactacgattatgcgaatgccgatgaattctactcaatggccaaaacaatcggctataaaaacctgacaaaagaacagcagcgctacttcactcaaattgaaaacacgcgtgaacttacagacggtttcaaaggcgttgccgtcggcctttatgattccggaaaagacgcggtcacaggcctgtgggatatggtcacagatccgggcggaacggttgaagccattacaggagcggtggctcacccgatcaaaacgtatgaagccatttcagcggcaatcgaagaatcgtaccaaaaagacatggtgaatggcgacacctactccagagcaagatgggtgtcatatgcagtgggcaccgttgtgacatcagtcgtcggcacaaaaggcgtcggcgccgtctcaaaaacaggcacagccgccaaagtgacgaccaaagtcaaaacagcagcaagcaaatccgccacagcacaaaaagcgataacggtctcaaaacaaaccgttgatcacatcaaacaaaaagtaaacacaggcatggaagtagcaaaaaaacgtgtcaaaaccaagttaaatcaaatcggagatctcaccctggctgatattctcccgtatcatccgcgtcacgacttagtgccggcaggcgttccttacaacgcagtcaacggggtcacacttaaagaaggacttcagaaattcgccaaggtcatcctgccgaaaccgtacggaacctccgcaagcggcagacggacaccggcaccgcatgtaccgccggtaacagtcaaatacggcgagcattttgcgaaatggaccagaaagaaagtattgaagccgaatgtcatctacaaaacaaaagaaggctacacgtacaccactgacaactatggtagaattacaagtgtcaaagcagacttgcagctgggagaagcaaaacgcaaccaatatgcgcagtcaaaagcaggtaaaccagaccgtctgacagatgacgacggaggccacctaatcgccacccaattcaaaggctcaggccagttcgacaacatcgtgccgatgaattctcagattaataggagcggcggcaggtggtatgaaatggagcaagaatgggcaaaggctctaagcaaaaaaccacctaaaaaagtagcagttcaaatagaacctgtctattctggggattcacttagaccatcatatttcgatgtaacttacaaaattgggagcagaaaagaaataagtgtctctattaaaaatcagcgagggggttaacctaatggaaactaagagaatgcaagatttatatcaacttattggagaaaaactaaatgacattatacctggtaaatggacaaagatatatctttatgcagaagtattagatgattccacaatggttctttttcacttcagaacaccagaaaataatcaaattatttattcacaagatatacctagccattacaacgtaagcaaggatattttcaagacgttgttaagagaactaagagaactttttgaagaattaaaaactgaacacagaaataataacgatgatgtttggacgaaccttacactaacattggatagcagcggagaattccaattagattataattatgatgatattttaacatcagaattagatggatatgaaagaatcgcaatatgggaatataaaaaccttggtattttgcctgaagatgaggatgataaagaatttgtaattagttaccttggtctataattaaaaaatagctcagccctactctgctgagctattttttataaaccaatctaaaataaagaaatttcagaggttttctatatgaatatattgattataaatacaattaataaactctataacgaggctaacctttctcaagacaattatctatcattatgcaaacaacctataacattaccagaagaaataaagttatttgtaaaaaaaatcaatggagatacaatctatcggagggtaaacaatggataaactgacaaaagaagagttgatcttgcttgtaaaggaattaatgaacccaacattagatgatgagaaagtcagtgaatatctcgctttatcagagaaaaatgttcctcatccggcaccaagtgatttaattttctggagcaatgaagattacacagcggaacaggttgtaaaaattgctctaaattataaagatgagtagtctaacaaaccattaaacagatatagcaaatctgaaatgtaatagagatttaaaaggagcatcatcttgacagtaagaaaagaattaacagaacaaatcaatttaataatcacatcaataaaaacaattaaacaaaagaatccaactccaatggtgaaaaacatattaaaaaggtacgaagaggcgaaagaagttatcaaacattcaacaaaggaacaattcgaagaagacctctctaaagttagaaataaactagacactttggcaagagcataccatagaatcagctagcgactacatgaatccaatgctcagagaaatgcataaaactgaaaagctcttaaaaaagtatgatgaaactggtaagtcataatcaccgcaatctaaaattcaaaaattgagattgcactaaccgacacaaaaccaaatataacacccaaactccctttttcggactgcaccgaaaactttttttggtctctcaaccccttcctattaaatttctgtattgataaaatttacataaatagtgagaagaggaagggtgaggagtttaagcacgatttcgtctccgcacgttgggttgaaaattaatgagtggaaccggcatattcaaaagtttaatgtgactgacgctgaaatgcttaaaactgagatcgaacgggacattgacatcatggaagaagaccaagacctcctgctttactatcagctcattacatttcgccatcagcttatgatcgactatgtgattccatctgaaggaaactaaatggagttatcagattattcaagagaattgaaggcagcaacagaaaaatggagaaactcgttaaatactactattacttttttcaaggaatgtatgaattcaaagagggcaatttcttaagtgccatttcattctatcataaagccgaaaacacaattccctatatttcagatgaaattgagagggcggaatttttttgaaaatggctgaagtgttttaacaaacccacgtatccatgcactattcttctcaggcgtataacgtttataaaacgcacgacctttactcagtccgcaaatacaatgccattttgtgatcgcaggaaactacgatgacctagaaagtcatgaaaaggcgctccctcaccttgaacaggcactcaaaggcgcacggcagcttgaaagcaaaaacaagcggatttacggtcaagctttatttaatatcggaaattgttatcttataatgggcgaattgacgaaagcagccaaatacatggagaaatcgatactccaattcaaaaaatcaaatttcaacaacttgacacaagcttaccaccatttagccttaatttattttctacaacgtaaacaagaccaggcaatggattgtttcagaaaaggcgtatgcttcgcatgtaaattcgacgatggcctatttaaaatcatgtttaaaggattacaggcactgtttatcaaaaaaggagaagcatccatttgattagatgtattcaataaattagaaacaccccagagatattcttatatggaagagttggcattattagacgagaagttttatactgaaattgggaagatggatgattctgttatctgtttcaaaaagatggttcatgcccataaacaaattcagagaggggattgtttgtatggaatttaaactgactttgtgcgctgtaattgctttgatcggtgtaagctttatcaatttttccttaggaaatgaagtaaacgtagcatccagaaacatgacaagcaaagctgcaaacgattcaacgaactccctagcagacaaagccatctttgacaaggaaataacgattgcagaaaacagaacgcttggttaaggacaagacgccgcttaggctgtgtctctttttctgaagagataggtgacaaggtgatagaatgtttatgttcaaactttcatatgcagaccaaacaaaagcataaaaaaacaagataggtgaaagtaatgtaaaaccaattaagagaaattgtaaacctctaagaaaaaataaatagctacggtcaaacaaatatactttctgttgaattcgaagaacaacaagacaatctaaatgatttgtctctgttattaaccgacatggacaagcttctaaagaagagtaaatatattgatcctaaccgtgttcaagatgttgatagacttctgatcgaaatccacagaaggatgaactcacttgaatggaatatacccgaaattagtgattcaaatataaaactgttaaagaaaaacatggaaacataagccttttccaatttaaaaaaggcaacactaacaaagaggttagttgccttttctaattcccagaaccgccacacactcctgatgcgtagagtgctgaatagtagatacaaaacaatattgagcagtgggaattcacctatatttccataacaatttatacagtaaaaacgattaaagcgtgaagaggattttatcaatcaagaaaaagttaagggatgatgtagtattaacaccccatactttcttactgttccagaaaggttcttaaattaatttgtgagctctggtacaaaaagattgtaatcgttttttggatataataggccctcaattgttgaaatagatttatcacccatttccaggtttcttcctactcttctctttatcaaaccgatttcttgtagtttattgttttcatatagcaatacaaaatttcctttatatttaaaaacatccgtgccaaatacctttgtcgaaaaaacacgaactttatttcgttccttttctttgtattcaactatctcatttttatttagcgtaaaagagcgattaaaatgggtttcaaaaataacttggagaatggaatttctaagtccatcaaaaaattccaaagaatacatgatctccttatgtgtaccctttatatctaattttcgaataagtattctgttctgtcttgagaaaggataaacctcttttgaccccataaatttttgaacattaccttgtttattttctatatttgatttatgttgatgtaggtaagttaataatttggtgctttgcaactggtaaaaaacattcatccaagctctatataaatcaaaagaattaaaggttccagaaatattctttgaaggtagccttgcaaacatttgaaaaagtgaattttccaaatctctgccgagttgatctccctcctcaattaataaatgcacctcgctacaatcttgtaattcagtaaaacttttttgaagatatccctctttttttgaacatatagcctcaatttttttaaaggcaagtccaaaactataatagtgttgaaataaacatgtcttaatcgcatcgtgatagagtgaccatgcttccggtgataatttgatctttatgtcattaaatcttaggaaaagtgtccttccaaaaggggattttgatattttatttccaaaatgataggcggctaataaagtgtttatatcaatcaccttcttccatacttcttaatctataaacaattaactctcctaaaagtatatttgcactcaaaacgttttctgggtttatttttaattcatcctttccatgcaccaggtcattacgatagtctctaaccttccataacttactaaagtcttcatcagttattggaatagatagttgccgaatcaaggttcgaactttgattttcaaaggaggatctttaagttttcctaaactcttttcttttattttcctagaatattcttctgtaaaagtatcactttgttcttttaatagttgcttcaacaattttttgaactccctaataatttcatcaggcaaaaaagggtcggtttctattttatcaaccaaaaattccatagctatgtttgtataaataaccttgtcttctatatcttctgctttccaacttctatttaaccactttaaagcattaaacaactgcttgtctaaagttgattgctgcccggtctgttttttgtacagtttttcttcataccaatccaattctctaaaaactttttcaaattgagaatcgacacctaaagaattattttcccaggtgtttttagaatcacccaaaatgttttctacgcctactagattttccacataatagagtgaagagcatttaggattttgatataatcttaatctgttccattcatttagctcattacctaagttatataaattaaacactctttcatttttggatagtaaaattatcatatcgattgcatcttgaactttttgtctacctaataaataggcatcatatacgttatctgattcgacaattgtttgagcaaaagtatcaaactgaccaagtaaattatgattatatttctcctcaaatcccttaaacatatcaaaggcttggtttttagttaaaaaggttacatcccccaacccaaattcaaaattatttagcattagattttctattggaagcaacacaaggtaaggaacaaatttcactccaaaaccctctatattaatttgttcctttaacattccggaactcctcaatatcgcctgtaatggtgaatttgggtctgaaccttgaaaagaaaagaaatccatcttcttcttacttagttcatgaataaatgagcttagaaaaattgtgattccatctataccttttttcacttcatatattgtccctgcagattctatagaattatcatttatccaatacctgataacccaatcctcagaaaggtgtatatttttcaaaccctgaataacattttgattactttcaaattcaaatttcccgtaaactaaacctcttctactcgatataagtaaagttttatgaggtctaattaatttaccgttactgtatacctcacaactcccacttattatatttcgctgtgttgatgtcagaattgataaagacttatatgtatcaatttctttttttattttcccattctcaaaatgttctacaatttcgtcaatagactcaataactatattcatagtgttatattcactatttaagaaatccctaagatttctaagaacgctacctatactcgtaatctctacaggaataattgacccgctaatgaaatcaaaaccgcatatcataaatttttctttgtttttttgtagaaccaaataatgcaaaatgacagtatctttggaatataacatcgataaaaccaaattgttattttcaaatccattgtatggaacactataactatttagaaaaagtgatgagtctagtgggttcatcatttattaccttctccttaattagacttcgaatgaaattcactttactaacgttaaactacatatgacgcagttacaaataggttgtgttttaaaagggacaattacttgccgaatattacttaccatctatattctacctattcaaaatatacatttccaatatattgaatcaaaaccgaattcctcatggaatcataggctctaacttctactatatcctcacaaaaagaaagagggttgtgcatgtggataaagacacattctttacaacgaaaccatcaaaaagtgtagaagtgaaccttctttataaaagtgatatgaagaaagtagcaggtatggtaggtattctatacagcaaatttcacgaaagaaatgaaagtgggtgttatttttatcaccagtcggacaagccagtattacccgaacactttgatgctttaaaaggtttactctaaatgtaccaattcaatagaatgctgatgcttgatgagaggtattaccctcaattcaaaatccaagatctaatttgtcagtcatagaaagaattgaaataatagaagatgggagtccaagaatccattaccgattctcggccccttatatatcttctattttttcacgagcaacacgcagcactccacatgattcgtatgcgggaacatatccaccggctgcacttcgagcgtctgatacccgccatcctcaagcacccgcaggtctcttgcaagcgtgccaggattacaggacacgtacaccacccgcttcggtttcatgtcgatgatcgtccgcaggagggcttcgtcgcagccttttcttggcgggtcgacgactagcgtatctgccgtgatgccttcttcataccatttcggaatgacggtttccgcttctccgactgcgaattccgcgtttgtgatgccattcagctcagcgttgcgtttcgcatcctcgatggcttccggcacgatttcgacgccgtatactttcttcgcctgcttcgccagaaatagagaaatcgttccgatgccgcagtaggcgtcgatgacggtttcttccccttgcagctccgcgtactcaagcgctttgtcgtagagcacttttgtctgttccgggttgacctgatagaacgatctggcggagatggcgaatttgacgtctccgatgaggtcgtagatgtattcttcgccccagatgacgtttgtttcgttcccaaagatgacgtttgttttgtttggattgatgttttgcacgatggatttgacgtgcgggaattgcgctgtgatgtcttcgatgattttcgctttgtgcggaaaatcgcttgttcttgtgatgaagacaatcatcatttcgcctgtgacgacgccgtatctgaccatgatgtggcggagccagcctttgtggcgttcttcgttgtaggctttgacgccgtatgaggcgcaaatatctttgacagcttgaacggcttcgtcgtttttggattgctggatcaggcaggcgctcatgtcgatgatgtcatggcttctttgctgatagaatccggcgacgagtccgccttctctttcaccgacaggcacctgtgctttgtttctgtagttccacgggtcttccatgccgagcgtcgggtgcacggtgactttggacaggtccagcttgccgatccgttctaagacgtctttgacttgtttctgtttaaacaagagctggccttcataggtcatgtgctgaagctggcagcctccgcattgcttgtagatcggacacggggcatccgttctgtgcgggctttcttctttcagttcaatcaagcggccgaaagcgaagccttttttgacgcgtgtcactttgatttgcgctttttcctcaggcagggcgttcggcacgaagatcgggaagccctgaacctttgcgacgcccgctccttcgtgcgtcaaatcctcaaatgtcacatcatagtattcatttttttctatcgggggtttcattttcatctataatcacctctagttttaccaatagccttgtttcagcgtgctggcaaaccttcaaattcaatgtcagccttcaaaggtttccgatcacgctgaaaagatgacaaaatcctaaaacgaatactgttttaggattttgtccgcgtattaatcatccagctgttccgctttctccttcggcatgatgacgtgaatatgccggtacaggttcacgaattcgcccggcagcatgccgccgtactcgccgtccaggttcagctgcatcttttctgatacattgactttcacacggttcgcttttgtgtaaataatgtgctgatcgttaatatgatcgcctctgagcgccatgctcgcgactctgataaactccgcgagattggcttttttcaaaataatcaaatcaaacatgccgtcattcaggctggaatcaggggccagtttctcgaatccgccgaccgagttggtcagcgtcactaaaaacagcataatttcgccttgaaacagcttgccgtcatattcaatctcgacttctgtcggtcgaagtgaaggcagcatttccattccctttaaataataagcaagctgtccgagcatcgttttcagtttgcttggcacatcatacgtcagctccgtcagacggcctccgccggcgatgttgataaaatactgaccgttcacctgtccgatgtcgatcgggcgggctacgccgttaatgacggtatcagcggcattcagtacattctctctcggaatgcccagcgctctggcgaagtcatttgtcgtgccgaccggaatgataccgagtgtcgggcgtttgtctaacggtgcaaggccgttgacgacttcattaatcgttccgtctccgccggctgcgataatcaggtcaaactcccgcaaagcggcttctgttgcggcgttggtggcatcccccgcgcatgtggtggcatgggtggaggtttcataaccggcttgttcaaatttttgcaggacctgggcaagatttttcttaaaaagctcccgtcctgaagtcggattgtatattatgcgtgcacgtttcattatctcatcatcctacttaagagtatccgatccattattaacactaacaacctttaattatactatgacttgagaaaatcgcaacaatatgtacaggaattgccagaagaaaaaaggccccggctccgtttaaggagccaaggcccgctgtcttactcttcttccgttccaggttttttcttacggaatttcgctaatacttcatatacgatcggcacaatcagaagggtaagcagagtcgaactgattaaaccgccgataacagtgacaccgagtcctttagaaatgacctggcttccgccttcgaagcccaatgccaatggaagcagggcgccgattgtcgcgatcgccgtcatcagaatcggacgcaatctcgtagagccggcttccaggagcgcttctctcgtcgataagccttccgcttctttatggatgacgcggtcaattaagacaatcgcatttgtgacgacgattccgatcagcatcagcataccgatcatggcattcagactgatcgtctctccggatacatacagtccggctaatgcgccgatgactgtaaacggaagcgagaacagaatcgcaaacggcgctaatgctccgccgaacgtgatcacaagaacgaggtatacgatggcgattgcggcaagcattgctaagccgagtttcgtaaaggaatcagcaatatccgctgatacaccgccggtatcaatcgatacattgtccgggtgatccagtttgtcaactttcttttgaacggctgatgacaccttcgtgacgttgtcagaagtgacggttgccgttacgtcagcgtacactttgccgtcgcgtttggaaatggtatcggatgtcgtgccgtttttcactttcgccacatcgccgatttttacttcttggcctgcaggcgatgtgatggttttatcctctaattcttttacactcttatactggtctttttctgttttgatgttcacatcaagctctttgccgtcctttttcaccgttgtcaaaggagactgtgacgtttgggacatcagggcttgggagatttgcgaagccgtcaggcccttcttgctgagtttctcctggtcagcgacgaacgtgtactcatcatatgtgctggaaaggcctgagttgacgtctttcagatccttctgctttttcatgatgccttcgatgtctttgaccgtgcctttaatatcagactctgaatctccgtacacatagtacgttaattcgttgttgttgcctgacgaactgaaattttgtgatttccattcgccgcggctggatgtttttttgatttcttttaagacattgtctttttctttgtcaaaatcaggcgtgtcatcctcgtatttcacgtagaacaatgcgccgtttgagcttccgccgagcggactttgcgagcctaatgaatactgaacggtatcgacatgtttgcgtttaagcagcatgtcttccgctttttgcgcagctttttcagcttcgcttttcgtttcgcccggttcaggcgtgtatgtgagctgcatcgttttgtccgcttgcgcaggcaggtagctcgcgccgatcagaggtacgaggaacaaactgccgacaagcatcagaaccgcgatgatagatgtaatccatttatgtcttaatgaccaatgcagcacttttttatagaaattggccaatctgcccggcttatgctctttcgctttaacaggcccgcctgtgagcgattttttgaataagctgtgcgcaagcatcggcaccagtgtgatcgaaatcaacagcgatgcggcaagcgcgaagacgattgttaatgcaaacggcataaacagctcgccgatctgtccgccgaccatggcaagcggcaggaatacggcaatggttacgatcgttgatgacatgatcggtttaaacatttctttcgtcgcttcacgcaccaattgcttcccgcgtaaaggttcatctttcagcctcatgcggcggtaaatgttttcgatcacgacaatcgagtcgtcgactacccgtccgatggcgaccgtcatcgcaccgagcgtcattatgttcaatgtgacatcaagctgattcagcacaagaagcgcaatcagcagtgacagcgggatggaaacgatagaaatcatcgttgatttaatatctcttaagaataagagaatgatcacgaccgcaaaaatcgcgccgaaaatcgctttgcttaacatcgtatccaccgactctgtaatcggctctgccatatcaagagtcgagctgtacttgaaccctttatggtcttttttgtattgattcagttcatctttaatcgcatcggccacttctaccgtgttggcgtcattggcttttacgatattaattccgatgctgtcctttccgttcgtgcgggaaatggattcagcttttttcacatctttaatgtcggcaatgtcagaaagcttgactgtcggcacccctgctgccgcgctttgctgtgcctgctgcatagcctgagcgtccgccgcagatgccgcaccggctccgcccgtttgaccttgagcggcagaagaagatgtgaccggaattctcatatctttcagatctttaattgacgtaatatctccgttaacgacaactgatttttctttgttgccgaacgtgtacaatccaagcggcgtattgacgtcagagccttggatcactttcttgacggtatcttcatcaagtccgtactctttcatttttttgtctttgaaagagaattccacctgctcttcctgctgtccggaaacttgcacggacgcaacgccctgaatgccttcaagcttaggaacgagagtgttttccacatttttggtcagatcttcaagcgaggttttgccgcttgtcacactgagcgtcaaaatcgggaaagagttgaggctgtaacgggaaatgtcaggttttttcgcgtcgtcaggaaggctgacactgtccagcgcttcagcgacttcggttttcgccttgtccatatccttgttgtaatcatattcaatcataaccgatgagacgttttcagaggatgtggacgttacgacgctcactccttctaaattctggaccgcctgctcgatcggttttgtcacgtcatccgcaacttgactcggagcagctccgggataagtcgtatttactgaaaggtaaggcatgttgacgtccggtatggattcctgcttcatattcagaccggcatacagccctgctacagtaacgataatcgtcatcagccaaactgcgaatttgttcttcagtacaaagttaataatgtggttcatcatgtcctccgttaatttttattgactgactggtcattctatataatactaaacggtataactcaacatcgtcaactaataaggcagtaaatttttctaaatttttcaggattaaggggaagcacgtcatgaacgaaaaaaaagagaaaatcataaaaacaggcatccatttatttgccaaaaaagggttttcttcaacaaccattcaggaaatcgccggtgaatgcggaatttcaaaaggggccttctatcttcattttaaatcaaaagaagaccttttgctgtcagcatgtgagtattacatcggcatgtctatggaagaaataaagaaaatcaaaacagaacatcagcataaaccgcctaaggacgtattccgaaaacaaatcgcatatcaattccaggaatttatggaacacaaggactttatcatcctcttgctgagcgaaaaggtcattcctgaaaatcaaaaggtcaaacagtattttcatgaggccaatattcaatttaacatgctgtatcgggatgcgttgctctccgtttacggagatgccgtcacaccgtttttagcggatgcgtccattatagcgcaaggaattgtgagctcctacattcatttcttgatttttaatgaacatacggcattccagacggaaaacgtggcggcctttctgattgccagaatcgatgacctgattacgggactgataaaagacaaccccgatccgctgctgcctgaggatatcttcacacagcccgcggcggacagagaaagactgcttgcggatattcaaaagataaaagcacagcaagggctccctgaggacgtcctcgtatcgcttgaagtcattgaagaggaatgcgcaaaggaagagccgcgaaaacctattattaaaggaatgctgtccaacttggcaggcagcggaaatgaacagattgaaacgctgcgggcttccattgaaacctatttcagcttataaaaaaaagagaccggcgcttaccggtctccgagtcagcagcgcccttagaggcggctgcttttttttatcgttttttgatttcttcaagtaagatcttgttgaccatcggcgggttggcctgtccttttgaggctttcataatctgcccgacaaggaagccgatcgcgcggtcttttccgtttttgaagtcttcaattgactgcgggttgctgtcaagcgcatctgttaccagcttcagaagcacgctttcgtcagaaatctggacgaggcctttttctttgacgattttttctgcgtcgccgcctttttcaattaattctttaaagactttcttcgcgattttggacgagatggttcctttttcaatcagcttaatcatgccggcaaggccttcaggagtcagcgcgacatcctcaagctctttttgttcggcgttcaggtaagctgagacttcacccatcagccagtttgatgcctgcttggcttctgcgcctttattgaccgtttcttcgaagaaatcagccatttctttcgtcagcgtcagaaccattgcgtcataagcaggcagaccgagctcttcgatataacgcttgcggcgctcgtccggaagctcaggaatggttgctcttacgcgttctttccattcgtcatcaatgtagagctcgacaaggtcaggctcagggaaataacgatagtcgtcagaaccttctttgacacgcatcaaaatggtttttttcgtcgcttcatcgtagcggcgcgtctcctgctgaatgactccgcctgacagaagcacctgctcttggcgtttttcttcatgctcaagtcctttttgcacgaacgcaaaggagttcaggtttttcagctccgtttttgtgccgaatttctcctggccgatcggacggagggaaatgttggcgtcacagcgcagtgaaccttcttccattttacagtcggaaacgcctgtgtattggataattgatttcagcttttcgagatatgcgtaagcttcctccggtgtgcggatatccggctcagatacaatctcgacaagcggcgtgccctggcggttgaagtcaacgagggaatagccgtcgcccgtatgcgtcagttttcccgcatcttcttcaaggtgaagacgggtaatgccgatttttttcgtttttccgccgacttcgatttcgatccagccgttttcgccgatcggcttgtcaaattgagaaatttgatatgccttcgggttgtccgggtagaaatagtttttccggtcaaacttcgtatccgttgcgatttcgcagttcaaagccattgcggctttcatcgcgaattcgaccgcttctttgttcaaaacgggcagcacgccgggatagccaaggtcgatgacgctcgtttgggtattcgcttccgcgccgaatggcgtcggtgagcttgagaaaattttagattttgtttttaattccacatggacttcaagtccgattaccgtttcaaagttcacttcatttcaccccttacagttcaggtttcgctttatgatgatctgttgcctgctcaaaagcatgagcgacgcggtatacagtgccttcatcgaagtgttttccgatgatttgcagtccgagcggcagtccgtccgcaaatccgcacggcacgctgattcccggcacacccgcgaggttgacaggaatcgttaaaatatcgttggcgtacattgtgagcggatcgctggttttttcgccgattttgaatgccggtgtcggcgttgtcggtccgacgatgacatcgtatttctcaaatacgtcttcaaaatctttcttaataagcgtgcgcactttttgcgcttttttgtaatacgcgtcatagtagccggagctgagcgcgaaggtgccgagcatgatgcggcgcttcacttcattgccgaatccttcagagcgtgtctgtttataaaggtcgatcaggttgtccgcattgtctgagcggtagccgtagcggatgccgtcaaagcgcgcaaggtttgcagacgcttcggaagaagacagcagataatacgtcgcaagcgcgtatttgctgtgcggcagagatacttcttcccatgtcgctccgaggtcttcaagcacttttaaagcggctaaaaccgattctttcgcttctttgccgacgccttctccgagatattctttcggtacggcgatttttaagcctttaatatcgccagttaatgaagaaagaaagtccggcacttcgacattggcgctcgtagagtccattttgtccgggcctgaaatcgcctgaagcaggaatgcgttatcttctacgtttcttgtgatcggtccgatctggtctaatgaagacgcaaaagcgaccaaaccgtaacgtgacacgcgtccgtatgtaggctttaatccgacgacgccgcagaaagaagccggctggcggatggagccgcccgtatcagatccgagtgaaaacggcacttcgcccgcggcaaccgcagctgcggaaccgccgcttgatccgccgggaaccgtatcgagattccatgggtttttcgtcgctttgtacgcggagttttcagtagaagaacccatcgcgaactcgtccatattcagctttccgatcgtgacggcttcagcggcttgaaggcgctccacgaccgtcgcatcgtaaatcggatcgaagttttcgaggattttgcttgagcatgttgtgcgaagccctttggtcacgatgttgtctttgacgccgatcggcattccgaagagaagaccgtgttcagaccgtccgtcaaccgcttcgtcaagttctttcgcgtaagcgcgggctctttcttcatcaagctgtaaaaacgcctgtaccttatcatccacggatgcgatccgtttgtaagattcatcgacaagatcggaaatcttgatttcttttttatgtatcatttgtttcagttctgtgattttgtgatcaaataatgacatactgtctccctcctttaatccagaatagatggcacacggacatagccgtctttatgatcgggagcatttttcatgacatcctcgaccggaaggcctttacccgcttcatcttctctcattacgtttttcattttcagcacgtgtgttgtcggttccacgttatccgtgtccacttcattaagctcctcggcaaacgagatgatgctgtcaagctgttctgtaaacatttcagcttcttcatccgtaatggcgagtctcgccaaatgagcgacatgctttacttcttctatagaaattcgtgacataagatccacctccgcataattctccgtttcgtcatataatactgatcatatcaaaaacgagccctctaaagcaacaaaacgccgccttctgaggcatgatgaaaccctctctattttatcctaaatcggggagaaagagaaacgaattatatgtcagaaaatttttacttttataatttattggtagcgttttcatctctaagctgttctatgttggcggggattttttccttgagcgggccaggtttcgagagttgattgatcggggatactttgttaggtttagtaaccatagccagcactaaatcatgcgatccgcatggaatgatgactaaaggctggatcgccggcgcatattccggcactactaatctacagaggtgatgcaacatttacatgaaagaagagagggtccaaaaacgtgagtattgaattaattatatctcttggcatttactttgctgccatgctgttaatcggctggtacgcattcaggaagacaacgaatattaatgattacatgctgggcggaagaggacttggcccgttcgtaacggcgctgtccgcaggtgcggccgatatgagcgcatggatgctgatgggagttcccggcgcaatgttcgcaacggggttatcgaccttatggctggcgctcggtttgacgatcggcgcgtattcaaattatctgctgcttgctccgaggctgcgcgcttacacggaagttgcggatgatgcgattacgattcccgattttttcgataaacggttccgccactcgtcatcattgctgaaaattgtttccgccgtgattattatgatctttttcacactgtacacatcgtccgggatggtatccggaggcaggttatttgaatcggcattcggcgccgactacaaattcggtttgtttttaacggccggtgttgttgtgctttacacgctgtttggcggtttcctcgctgtcagtctgactgactttgtacagggagcgatcatgtttgcggcattagtgcttgtgccgatcgttgcttttacccagctcgggagcgtttcaacgacgattgattcgatcaacgccgttaacccgaaactattggatatctttaaaggcgcgagcgtcattagcattatttcttatttggcatggggactcggctattacggccagcctcatatcatcgtacgatttatggcgattaaagaagtgaaagatttaaaacccgcccgcagaatcgggatgagctggatggttatttcagttgtcggttcattgcttaccgggattatcggggttgcgtattctcatcacttcggagtctccgtaaaagatccggaaacgattttcattattttttctaaaatcttgttccatccgctgattacgggcttcttgctgtccgcgattttagcggcgatcatgagttccatttcctcacagcttctcgtaacggcaagcgccattacggaagatttataccgcgcctttttcagacgggaagcgagcgataaagaattggtcatgaccggacgcctgtcggtattgatcgtggccgttatcgccattttgctttccatgaatccgaacagcaccattcttgatctggtcggatatgcgtgggcaggcttcggttcggctatcggcccggcgctcttgctcagtctgtactggaaacggatgaatgaatggggagcgcttgcggcgatgattaccggggctgcggccgttttaatctggatcacgacagggcttgccgcttcaaccggcgtatacgaaatcattccggggttcttcctcagtctgattgccggtattgccgtcagcctgctgaccaaaaaaccggccgatgcttcttatcagctgttcagccggatggaagctcttttgaaaaacaagaaatagacaaaaagccgtcagattttatccctgacggcttttttcttccgcacttgtcctgctataaatactgtgagaaaatcatatcaatttattataagaaaattgcggaggtgctgtgcaaattgagctggcctatcgaaccagacattttattaaagctgggcattgccacgctgatcggcatgatcatcggtcttgaacgcgagctgaaaaacaaaccgctcggactgaaaacctgtatcgtcatcgccgtcagctcctgtatgctgacgatcgtcagcattaatgcggcatatcatttcccaaaatattaccgaatcatgatggatccgctccgccttcccgcccaaatcatttccggcgtcggttttattggcgcgggtgtgatcctgcgtaaaagcaatgacgtcatatccggcctgacgacatcggccatcatctggggcgcagccgggctcggtctggctacaggcgccggcttttataaagaggcgttcgcaagcctcttgtttatcctgatcagcgtcgaatttcttccgtggctgatcagaaaaatcggtcccaaccgcttgaaggaaaaagatatccgcgtgagaatgtctctttccgataaagacaaaatgaccgagattttaaaggaaatgaaaagcaaacagctccgcattcactccgtccggattgatgatctgggcgaaaaagaatttccgattatggaagtgaaagtcagtgttcataaaaaccgctacaccactgacgtctattatgatattaaagaaattcaaggtgtcgtcggagtgaagtgtgatacgctataaaaaaacgccgggctggattcagccggcgtttttctatttatacgaatgcagaaaagttatactccgtaatcggggtttcattttcgatattgcgcctgaaggttttcagcatctcaagttcctcgtccccaagtgaattgaggtcaaacgcctgatgcaataatccgtagatcagcatatgacgcagccggaggaaatccgggatgtgttcaagccaggcgggatcaaggtcattttcttccctgtagcctttcataaagtgagtcatgaattcacccgtaaacgcggccttgtcttcatacgggatgaccggataccacaacatgttgtacagcagaatactgatatcattcacaaaccaattgtagccgatatcatcaaaatcaaatgcagtgatttttccgttgtcccaattgaaattgccgtggtgcagatcggcgtgcacaagtccgtagttttcagggttcttcggcaaacggcgcagtttttccattagagcatccgcccgctcaaatacgagatgctgatctgcgggcacgtattttctcagcttcagctgctcctcttcatcccattcctgccttttatatgtcggatcgctcagacggtagcttttcgtcagccggtgcatgttccccgtgtactttccaagctcgtaaaacagggttccgttccagtctgattcctccactttgcgtccgggcgctttttcatagactcttactaaaaacgctccgccttttccatccggcacttcttcgacatctttgccatttaatgaaggaatcggctttgctgctgaaagccctccctttgccagatgatgaagccattccatttctccgagaatatattccggtgttcttctgatcgtatgcgtaatttttaaaatataaggttcgttatcttttacaatttcatatacgtagttctctgcgtccgcgataaattgaaacttggtaaagccgtatatttcacctgcttcagcgagcaccttatcttcctcaaaaatcgctttaatatctttatgcatgctgattcacccttttcataacgtttgtaggcggtgtgtgtactcagcaaatgtcattcatcaacattcctgcccttcttttttcacagcagattagtaacatccgcttagaaatgaaatgtgttttcctgttaattcctgattatacaaatatcttaacatacctcattcctcgctccaacgatattcacaataaaaaaaacccttgctcatacagaaatgaacaagggcatcttggttaatcgtaaatatggacggtcggttctttgtcacccgcattgcggacgatcagcgcttcctgcccgtcagacgaggtaatgttaatttcgacatcaactgagccttttgaataataatccatcagctcacctgttaagtattgggtgaaggcgatgacttcgcttttcccgtaaaattgcatcgggatttcaatcttcatttttctcatttcatcgttttcgtacattgccgttccgacgactccggtgtaattcgggaagtagctgtcgatggcgtttttgaagcgtttaaatacttcggaatcatcagggtatttctttgccgtgtctgtatccgccggatagaagacgtacttttctttgacatcatcccagtttgaaatggtggatgagccggctttgacttctgtttttgcaatgtaattccccggtacgattgatgttttcggcgcttgtttataaagggcgacggtaatcggcacatttttcaggttatccattttccgaaggcggttaacgacttcctgagcgatttcttcaccgtggctgcggatcgttttgtcactgagctccacttcctgctgcggatcacctgtgttttcacggtaatagtatacagagttgagagcgagaccgatcatgataccgccaagctggatggaatttttatcttttcttactaagtaatcctgctcaagcatggacgctaagtaaatcgggctgttttcatttttctcttttgccgatcccgagcttggcagcacgggatttaagccgagattctgaaaattggaatctgcctttttcgcctttttcagatcactgccttcttttttgcggtcaagccagctgagtaccgtgtcctcatctaaatactggccttcctgatacaaatagtcatccgtcgggaacgtgtcttgagcgagccgcatcagacccgtctcgaattcatcgatgtccagcctcgtgttcagccggtccgcggtcaggccgcgcgcttttccggccttaaacggaagcaccattttatagtaggaatcagagatattatatttcggtatgatcgctttttcagaagactttgccgttttctgcgtgatctcttcctctttgttccccccgaaactcggcgaacaggccgacagcatgagtactgccgccgttgccgtcgccgccaatgccaacatctttttcaatagaaaacactcctcttatttctttagctctcccaatagctgtgcttcattccatacttcaatatttaattcctgcgcttttgtcagcttgcttccggccgcttctccggcaatcagcaagtctgtttttttgctgacagatcccgtcagctttccgccgagcgcttcaatctgcgccttggcttcatttctggacagctcttcaagctttccggtcaacacgatggttttgccggcaaaataagagtcgctgtcctccgcttttacttttttcgggcctttgtagagtgtgttcacaccgagttcctcaagttcattcaatagctcaagcatttcttctttgcggaaataggtgataacggcatcggccatcttttcgccgatttcatccaccgcaagcagctcttcttccgtggcttgtttcagattttccaggctttcaaaatgcatggcgagtgttttggccgcttttgagccgataaaacggatgccgagaccgaacagcaggcgttccagcgaattctctttcgacttttggatggagctgatcagattgtcagttgatttttcccccatccgctcaagccggatgacctgctctttcgtcagcttatacaaatcagcgacattacggacgagatgttcacggaaaagctgtgtgatgacacgttctccgagtccgtcaatattcatcgcgttgcgtgagacaaagtgaatcaggccttctctgatctgcgccggacattccggattgatgcagcgcagcgcgacttctccttcaatgcggacaagttcgctttcgcactcagggcagctggtcggcatattgaattctttttcttccccggtccgctgttcgattaagacattgacgacctcagggatgatgtcgcccgcttttttgacgaccactttatcgagaatgcggatatccttctctttaattaaatcttcgttatgaagggatgctcttgagaccgtcgttcccgcgacttttaccggttccagaacggcggtcggcgtaataacgcccgttcttccgacattcagttcgatatcgagcagttttgtcacgacctcttccgccgggaatttataagcaatcgcccagcgcgggctttttgccgtatacccgagctcttcctgctggtcgagcgagtcgactttgatgacgatcccgtcaatttcatacgggagatcggcccgcttcgcctgcagctcttcgatcatttcaatgacttcatctatcgtggcgcattttttccgttcctggtttgttttaaaaccgagctcatccagaaaatccaggccctgactctgtgtttccacacccatctcgtcaagctccgctatactgtagacgaagatgtcaagatttcgtttcgctgcaattttcggatcgagctgtctgagtgagcccgcagccgcgttccggggattggcgaacggctcctcttcatgtttcagccgttcttcattgagcgcttcaaatgactgtttcggcatgtacgcctctccgcgcacttctatggaaagattccgtttcattttcagcggaatgttgcggatcgtttttaagttttccgtgatatcttcgcccgtcgttccgtctcctcttgtcgcgcctctgacgaaatagccgtcttcataacggagagaaacagcaagaccgtctattttcagctccacattataagcgacgccgtcaccgacagcctgacggacgcggcggtcaaaatcgcggagatcatcatcgttaaatgcgttgccgagactgagcatcggcgtgccgtgctgcaccttttgaaacgattcaagcaccgctcccccgacccgctgtgtgggcgaatcaggcgttctgagttccgggtgctcttcctctatggcaatcagctcctgcatcagtctgtcgtactcggaatccggcacgctcggttcatctaaggtgtaatattcataactgtactgatcgatggtgcggcgcaattcttctgcccggtgtttcgctgtttctttgtccatcatgttcttcctttcctcttcaggttactgcttttcaatcggcgcaaaagcggcaagcagacgcttcacgccgactgggctcgggaatgcgatatcaagctcggtgctttcgccttctccttttacgctgacaaccgttccggtgccccattttttatggcccgctttatcgccgaccgcccagctgagcgagtcgccgcctgttttgttcgcataggaaacgggacgggatacgggcccgcgttttggctgcacttttcttcccggctgcatgcgaggtgttttcttctcatttaggttctccaataaatcgccaggtatttccctgataaagcgggattccggattcatattggtgcggccgaataaggtgcgcattttggcattcgttaaatacagttcttcttccgccctcgtaatgcctacatatgcgagcctgcgttcttcttccatctcggcttcttccatcagggagcggctgtgcgggaacacgccttcttccatgcccattaagaacacgacaggaaattcaagccccttagcggcgtgcagtgtcattaaagtgacggcatcctttccgcctgattcctcttccttctggtcgagctggtcaatatccgcaatcagcgccaaatcagtcagaaacgcgacgagagacttgtcttcgcttttttgttcgaagtttttcgtcacggaaagaaactcgtcgatattttcaagacggctttgggcttcgattgatttttcggccttcagcatttctctgtattccgttttctcgagaatttcttccgtgagttccgtaatggacaggtaatcctgcatgttcgtcagattttcaatcattacgccaaaaccgtcaagcgcgtttgccgctttcgcgctgacgccgatgaaatcaacctgtttaatcgcctggaacattgacattccgttcatcgccgcatatgaagcgattttttctagtgaagtggcgccgacgccccgcttcggcacattgacgatccgcgtaaaactgatgtcgtcgtccgggtttgacacaaggcgcaggtatgcgagaatgtctttaatttctttcctgtcgtagaacttggttccgccgacgatattgtagttcagtccggattttaaaagggtttcctcaatgacgcgcgactgggcgtttgtccggtataaaatcgcgatatcggaaagcttccgccggcccgagctgtgcagctcataaattttgcccgcgacgaattggccttcgccgaattcattgtcgccgctgtaataagaaagcttgatgccttcgtcattttccgtccacaggtttttcggcttgcggtttgagttgtttttgatcacttcgttagccgcctgcagaatccgctttgttgagcggtaattttgctcgagcagaatcacgtttgcgctcggataatctttttcaaaggaaaggatattcgcgatatccgccccgcgccatctgtaaatggactggtcggagtcaccgacgacgcagatattttcaagacgggccgcgagctgcttcacaagcaggtattgcgccctgttcgtatcctgatactcgtctacgtgaatgtactggaatttgcgctgataaaactcaagcacttccggcacacgctcgaaaagcttaatcgtcgtcatgattaaatcatcaaaatcaagcgattggtttttcagcagttttttctgataatcggtatacacgtcactcgtgacctgatcgtagtagccgccggccgattttgcgaattcctcaggttcgatcagctcgttttttgcgctgctgatggaccctaaaatacttctcggatcaaactttttcggatcgatattccgctctttcagaatccctttaataacggaaagctgatcagccgtatcaagaatggagaaatttcggttgatgccgattctgtcaatatccctgcgcagaatccgcacgcacatgctgtggaaggtggatatccagatttcatccgcgccgggtccgagaatgctctctaccctctccttcatttctctggcggctttatttgtaaatgtaatcgccagaatgttccatggcgccacgtgtttttccgccattaagtatgcgattctgtgcgtcagcacacgtgtttttccgcttcccgcgcccgccatcagaagcagcggaccgtccgtcgtcttgaccgcttcctgctgaacgggatttaatccgcttaataattgattgctaatgtaattcatatccgttcaccgcctatcaaacatatgttctatcataaatcaatttcgtccgcttggctactttgtctttacagccgccaccgttttaagcgcctgatcaaaatcttcatatacggcatttccgacaacgatgacatcggcatgacggccgaaccgttccgcggtttgcgcgtctttaatgccgcctccgtaaaacaggacggacttgtccagcacagccttcgttttctccaccgtttctatgtccgccagcatcccgctgtattccagataaaaaatcgggagatgaagcaaatgttccgcgacccgcgcataggcgagaatatcttctgtttctatatgtgtatccgcctccgtcaaagcggccgccttacaatcagggttgacgatgcagtagccctccgtcacgatttcctccattgacatgagctctccgtattctttcatcgcctgatgatgcatgccgacaatccagtccgcctttttgctgttgagcacactcggaatgaaataaagatcaaacccgggcacaatggaatcaatcgtcgacacctcaagtacgcacggcactaaaaaccgccgcacctttgacatcagtctcagcacattgtcctcggtgatattgtcgcttcctccgatcacaatggcgtcagtccctgattcacaaagccgttccagctgttcatccggtaaatctttattcggatcgagtttaaaaacatgcttccactcgttaacatcgtacatgcgttttcgttcctccattcgtttcttgccatttaaacattataacaaattcgtttggcccggaaaaacggaaaaagacgtcattcacctgattcacaaaaaaagattgcgctccgccggacgggaaacggctatgtttgaaaacagacaatatgtggaatgtcaaagagaaaaaagacaaggagtctgatctcaatggaacaagccattatcgtactgatttgtatattgatttttattattttagttcccgccgcattgtttctctggatatacataagagacgaaaagcaggaagaacattcagtgctgcgcaattatcccgtagcgggaaaactgcgctatatatttgaaaaaatcggacctgagctgcggcagtatttattcagcaatgataacgaagaacagccgttttcccggagagaatatgaacagacggtcatgtcgggaaagtataagagcagaatgatgggcttcggctcagaacgggatttcaatcagccgggctattatatccgtaacgccctcttcccgaaacaaagggaggagctgcgcgcagatcagacgccgaagatcgacacgatggtatacaagattgacaaagacaacctgctgaaacgcagcgaacaccgcgaaaaggcaaaagcggacccttattacctgcatccggacgatgttcaagtgatcggccgcgacacatgcaagaagccgttttatgtgaaagggttaatcggacaatcagcgatgagctacggctcacttggcgaccgggcaatcaccgccctgtcaaaagggctgcaccaggccggcggcacatggatgaatacaggcgaaggcggcctgtctgagtatcacctgaaaggcggcgcggatattatctgccaaatcggccccgggctgttcggcgtgcgcactgaagatggagaattttcatgggaagaatttaagaaaaaaagccgcctcgagcagattaaagcctttgaattaaagcttgcgcaaggggcaaaagcaagaggcgggcatattgacggttcaaaggtgaccgaagaaattgccgccatcagaaatgtgcagcccggacaatccattgacagcccaaaccgcttcaacgagttctcaaatgttccggacatgcttgatttcattgagaaattaaggactgtcggcgaaaaaccggtcggtatcaaaattgtcccgggcagccgcaaagaccttgaagaccttatttcctgtatgagttcatcaggcaaacttcccgactttattacgattgacggcagtgaagggggaacgggagcttctttccatgagctggcggattccgtcggcctgccgattctgaccggccttccccttgttgacggtcttttgaagacatacgggataagagataagctgaaaattttcgcatccggaaagctgctcactccggataagattgccgttgccctcgcgttaggcgcggattttgtcaatattgcccggggaatgatgttttcagtcggctgtattcgcgctcaagtatgccacaccaatcattgtcctgtcggagtggcgacaaccgatccaaaacttcagcgcgcgctcagtatcgaagataaacagcaccgcgtctgcaactacgtgctctcgttgcgtgaagggctgtttcacctcgccgcggcggcgggcatcagctcaccgattcatttctcagctgaacacatcgtataccgggaggaagacggaagcctgagggaacttcccggccttttgaatcagcacgcataaaaaaaaccgcctgccgtcatcggcagagcggttttttacgtagctgaggaggattctcctttgtttacgcggtcaagcgccatttcataggcgtcgttaccataatttaagcagcgcttcacccgggaaatcgtcgctgtggaagcacccgtttcgctttcaattttgtgatacgtattcccttcgcggagcattctcgccacttccaaacgctgcgccagcgattggatttcattaatcgtacaaagatcgtcaaagaaacgatagcattcctccagatctttcagcgataaaatagataaaaataactggtccagttcttttccgcgtaatttatcgatttgcatcgtcaaacaccttctcctttactaatggaagctgcatcgagatcaggcacgatattaatccatgtctttcctggcacaaacggaagaatctcaccgccttttacgggcagaatacggccgtctttatattcccagtctgactccataacatcgccgtgctgaagcaggaggcccttcccccctgactgaatatcgatggctcgccttccatctttgtctgtcatgcgatggccggcttcaacaataaaaatgttgtgcatggctaaaggctttccggtctcccggtctgtcgctttcacaccatcagagcttcttgtataagcatcagcttttttatcataatcgtattcgacaagatttgtaatgttttgtgttccataatctatccgaatattgtaggtttcatttcctggttttgcatctgatgtctgaaatgggagcggttctgtttttccgttcagcttgtaccctttttgttccgccgccttcctgatattgtcatacgacgtataggaattgtggggcggcttgctgaaatcggctctccaaaacaggcttccatcaaaatccaaaccgtttatataatcgtaagctccggactccagctgcttttttgcgccgggactccagccatgatggacaaatatgctgttaaacccgctgctgagcgtgacaaaatattccctcgcgctccgcacaggcccgaccgtttccggcatctcactttgaaaaatcgcgagaaaccgcgtaatccggccctctgcgagcgcttcgatgacaacatccgcctttgacagcccggattggggcctcgccttcggatgattgttcactgcgactgcaatcggacggcgttctgcaagcttctgctcagttttcagccccgttaaaggagcttccgcttctttcggctgcacctgatcggcattattctgccggcaggcggcaagcagcaaaaacgcaaaacaaagcatacaaacggttttccatcttttcatatgtcggctccctgcttttatattttaacgcattatcgatggaaagagtacagtttttttcatcacgtcgaatattcctctcggcgtaatgcggatataaggcaggtgtgtgctctgcaaaaagagcagcgtatagatcggatcgcagaatcggtagccccgctcctccagcaacgtcctcagtttttgctctttctcaagcacttcttcatacttctccgcggatgcagaaccgtttaaggcgaggggaatctcatgaagaatcttcccgttttcggcaagcacgattccgccgccgatttctttcatccgtgagaaagcgagcaggatatcttctttattttttccggcagcgataatatctccggttgtcgtgtaggaactgacaaagccctgcacccgatcggcaaaacctttcagcattgtattgacccgccattttccatgcttatcgagaagcgtgagatagcattcatcatgatcaaaagaaagctggtcaacagaattatcaatcgcaatcatatacggctccataatgaccgcgttgcgcattatcacacccatcggcattgaaaactgtaaatcatccatcgtcatatcatatgaaagctcaagagggacaagaccgccctttttccaatccgtttctgtaaacgcattcatatttcggccgtcttccctcagcaggatgcctttggagatcaccgtgaccgggtccggattcatcgggtcatcaagaatattcaatgaagcaagccggcccggaccgatcacaccgagaaagtcatccatctgataatatttcgcgatattaaaggaggccatattgtaggcgtcaatcgccggaaccccttcctccaaagcgattttgattaattcattcgtcatgccgcctttataaaaattcggcgtcgctccatccgtcgtgtaaaagaaatgatcataatgccggaagcctttttgatggagatcctgcaaaatcgttctcaaatcagggcggatggatgaatgtctgagcgaaacatagtagcccaattcaagccgtctcatcacctcatcgccattcatcgcctcgtggtcagaatcagccccgaacagtttcatcttcgtcagtgttttttcagaggctccgggaaaatgcccttctatccgcttgcgcagtttttttgtcgcctgcatgcaatgaagcatcaagtcatcgccgtccatgaggcgcggccatccggtcaattctccgccttgaatgacatccgggtgctcaatccattgcttgcggacatcaaaagaaagaagctgatcctcattcagcacttcagtctgcagatcatatctggaccaccagaaatattgcaccggctgttttttcagttcctccaatatagtaagcgctttctttttaccgctgtgcaaaagaaaaaacaagttatcattaacaaacgtcgttgttccgaattgagacacatattcggcgagcgtttggggattatatatttgaaaaggatgtgtatgcggttcaatgtaacctggcacaatgtattttccttcacaatttatggtatgaatgtgctctgctgcatcaggaagctcatcaccaacatatacaattcggtctccgtaaatccagacattctttttcagccattgttttaaaaaaggatttaatacgagagcatcccgtaaaagtagcgttggaagcagctttgagtctacaacatccgcctgtgatctgatgtctttgtttttccagttaaaggtacgttcggacattcacatactctccttcgcttatattagacccatcgtatcacatccgcacaattatcgcacggctaaaacgttacaaattattgaagatgaatgaaaaactttttctaagggagctgagatgatgaaaccgaatatcagtttattaaatgccgttctgcgcatcacttgcggcctcaccattttgtctgctgcttcagcaaaatacacgagaaaaccttggtacaagatgcatctcttctgtatgatgatgggtgcgatgaaagcggcgtccggcatcctccgcttctgtccggtgacatatatgttccaaaccggaatgaatcaggatgacagccatcagcaagaaaaataacaagccgtttcggcttgttatttaatttctcctgtcccgcgagtctgagaagaatccgtctatacgccggaggacttcatcgatgactgcgtgtcacacggcaagccgacagtcttagtcgtcttttcagaagaaaacccgcatctgatatgacgcggggttttcctctttatcgctgcgatgctttcagcgcacgggcgccgatgtcgcttctgtaaaacagtccgggttttgtcagccctgaaacggcgctgtacactttatctctcgccgcttcaaatgtctcagcaaatgccgtgacattggcgacccggccgccgtttgtaacaaattgtccgccgtcttttttcgttccggcatgaaaaacggcgatcccgtcttcagcggacgtcaaactgccgatcggagtgcctttcgcatagccttccggatagccttcagaagccagcacaacgctgacagcggccgtatccttccaccttaggtcaacatccttctcatgcagaagatctaagagcacctgaatgaggtcagattccattctcggcacgacaacctgtgtttccggatctccgaagcgcgcgttgaattcaatgacttttgatccgttttccgtcagaatcagccccgcgtacagcacgcccgtgaaggagcgcccctctttcaccattgcttttgccgccggcttcacaatcgtttcgactgcgcttctgacgatatcatcggaaatgtgcggcactggtgagtaggctcccattccgcccgtattcggccctttatctccatcgaaggcgcgtttatgatcttgagcgattaccatcggatagacggtctccccttttacaaacgccattaaagaaaattcttcgccggcgaggaactcttcaatgaccacagatgcgctcgcctccccgaatttctcatcctcaagaaaatcgtgcaggcattcaatcgcttcttcttccgtcatcgcgaccgtgacaccttttccggcggcaagcccgtccgctttaatgacaatcggcgcacctttttgctgcacatatgctttcgcctcttcaaatgaagtaaacgtctcatactccgccgtcggaatgccgtattttttcattaaatccttggcaaactgtttgcttccttcaatgatagccgctttttcagacggtccgaaaacaagcagtccggctttttcaaactcgtccgctatcccttcaatcagaggaacttcggggccgataatcgtcagcccgacatgatgttctttcgcaaacgcaatgagtgcggcatgatcgctttcttcaatgttgaccagcgtcgcgcagtctgccataccgtcatttccgggcgcggcgtacaccgtgtcaacaagcgggctttgcgccgctttccaagccaatgtatgctctctgccgccttttccgataatcaatacattcacgcttcgttccccctcttaatgtttgaaatgtctgatgcccgtgaataccatggcgatcccgtattcatccgcttttttaatcgaatcttcatcgcggaccgatccgcctggctggataatcgccgtgacgcccgcttttgcggcttcttcgactgtatccggcatcgggaaaaacgcgtctgatccgagcgcgctgccttttgctttttctccggcctgctcaatggcgattttagctgaaccgacgcgattcatctgtcccgctcccacaccgaccgtcatatggtcttttgcaagaacgatcgcgttggatttcacatgtttgacgactttccaagccagcttcaaatcttcccattcctgctcgctcggctctctttttgtcgggatgctgatgtcggcgtcatcaaatccatggacgtctaaatcttgaatcaaaagaccgccctgtacggatgtcagctgtttttctttcttccctgatgcggacacgtcaagcgtgagcagacgaaggtttttcttcgccgtcagtacgttcagcgcttcttcactgaaagaaggggcgataatgatttctaaaaagatgccgtgaagggcttcagccgttgcctgatcaacttcacggttcagcgcgatgatgccgccgaaaatggaggttttatcagcttcatacgctttattgaatgcttcctcaattgaagctcccgtaccgactccgcacgggttcatatgtttaacggcaacagctgcgggttctgtaaattcccggacgatttgaacggccgcatctgcgtccttaatattgttgtaagaaagctctttgccgtgaagctgttttgccgccgcgatggaaccggagacgggaagtgcgctttgatagaaaacagcctcttggtgagggttttcaccatagcggagcgattgttttttctcaaatgtaacggtgaattgctcagggtctttctcaccggcctcgcgtgttaagtaatcagcgattaatgcgtcgtatgccgcggtatggcggaatactttggccgcaagctcgcgttttcttttaagcgaaacgccgccgtgttctttaatctcattgagcacggagctgtaatcggccggatctgtgatgaccgtcacatcctgatggtttttcgatgcggcgcgcagcatgccgggtccgccgatatcaatgttttctatcgcttcatcgtatgttacgtcttctttcgaaatcgtttctttaaacgggtaaaggttgacgaccacaaggtcaatgggggcaatgccatgctcattgatctgcgccatatgctcttcattgtctcttacggcaagcagtccgccgtgaatattaggatggagcgtttttaaccgtccgtccataatttcaggaaatccggtcacttctgaaatgccgatcacatccacaccgttttcctgaagaagtttttttgttcctccggtcgaaatgacttcgacgccgagctctgtcagttcctttacgaaaggtacgagatttgttttatcagaaacactgattagtgcgcgtttgattgtcatgccttttcacctctgttatttagtcccagcagctgtttcacaacgctcggataccatttgtgctcaagctcgtgtattgtatgctctatgtcttcaagcgtatcgttttcctgtatttcgaatgctttttgcgcgataatcggtccggtgtccatgccttcgtcgacgtaatgaacggtaatgcccgccactttcacaccggcccgatacgcctgtccgacagcgtcaatcccagggaatgccggaagaagcgagggatgtatattaataatgcggcccccgtatgcttcaagcagcgtatctccaatcagtctcatatagccggcgagaacgattaattccgccccgtgcaggcgcagctgttcaataacggcccgttcaaaggccgctttgttttcaaaagatgacggttcaaaggcgaatgacggaatgtgtaaagcctccgccctttccaccgcctttgcctgaggcttatccgttacgagaagcgagagctccgcatcccacttctcttctctcatgcgtttggcaatggcctcgaagttcgatccgtttcctgaagcaaataccgcaaactttttcatgaaagagccgcaccgccgaaagaaatgccttcgccccgcttgacccggccgatcaaataagccttctcgccctgagcttcaagcatgtcgataacctctgtcaagtcctcttctttaacggcaaggacaaaaccgatgcccatattaaagacattgaacatttcttcttctttcagcttgccgtgctcctgcagaaacggaaaaatcggcgggatcggccatgatccgtgatcaatttccgcgctcaatccgtccggcagcatccgcgggatgttctcgatgaatcctccgcctgtcacatgcgccatgccgtccaccttaccgcttttcaccgccttgagcaccggcttcacatatattctcgtcgggtccagcaattcttctccgagaggacgcgcaaacggttcatagacagtatccaaatcaagtccgccgtcatcaagaagcacttttctcacaagggaaaacccgttgctgtgaaggccgcttgaagtaagtccgattaagagatgcccctcttcgatatgttcaccggtgacgatttcgtctttttccgcgacgccgactgaaaagcccgcaatatcgtattcatcagccgtatacagccccggcatttccgccgtctcaccgccgataagcgctgatcctgactgctcgcatccgtccgccacgccctgaacgatctgctcaatttttaccggatcggccttgccgaccgctaaataatcaaggaaaaacagcggctccgctccttgggcaagcacatcatttacacacatcgcgaccgcatcgacgccgatcgtgtcatgcttatccattgaaaatgcgagtttcagcttggtgccgacaccgtctgttccggaaattaaaacaggcttttgatacggaagctctgacagatcaaacattccgccaaaaccgcccaggcttcccataacgccgagccttttcgtgcgctccacgtgttttttcattcgtttgacggcttcatacccggcttcgatgtcaactccggcatttttataagcatcagacatccctatcactccttgtcaattcgtttctccttaaaaggcagaaagagaaaggcagcctgaattcccgctgcctttatgtcattttcacattttattttgtcagcaccgcttcttttacgtgaggaagcactgtatcctgataaatttccgtcggatatttgcccgtaaaacaagcgaggcattgtccgcaattggtgtcttcaaatgttcggccgactccttttaacaatccgtctacacttaagaaagaaagcgtgtcagcaccgatgatctggcggatttcttccacagaatgagaggaagcgatcagctcctcatgggttgatgtgtcgatgccgtagaagcacggatgagcgatcggcggtgaactgatcttgacgtgcacctctgtcgctcccgcttctctgagcattgtgacaatccggcggcttgtcgtcccgcgcacgatagagtcatctaccatgacgacacgtttgccttctacaacaccgcggacggcggacagcttcattctgacgccttgctcacggagagcctgtgacggctggataaacgttctgccgacataacggtttttaatgagaccgagttcgtacgggatgcccgttgcctcggcatagccgatggccgcagaaatactggaatcaggcacgcctgtgacgacatccgcttcaaccgcggactcctgggcaagcatttttccgaggtttttccgggcgctgtgcacgttaatgccgtcgatattgctgtcaggtcttgagaaataaatgtactccatgctgcagatggaacggttgatattcatggagaaacgctctgatttcatgccttcatcattgatgatcagcatttcgcccggctctacctcgcgaaggtatgtcgcgccgaccacatcgaatgcgcatgtttctgatgcgacgacgtaagcatcgcccatcatgccgattgacagcggtctgagtccgttcgggtcaagcgctacgatcatttctgtttcagtcatgattaaaaaggcataagcgcctttcagcatagatagcgaatttttgatctgatccttcagcgaaaagtgtccgctgcgtttaatcaggtgagccagcacttccgtatcggaggaagtctgaaagatgctcccttggttttcaagctgctgcttcaactgtgtggcgttgaccaagttgccgttatgggcgagcgcgaggctgccgttgttttgcgaacggaataggagcggctggacattttcatatccgcctccgcctgccgtcgcataacggacgtgcccgatcgcgccttttcccttcactttgctcagttcgccgttttgaaaaacctcggtaataagcccctgtcctttatgcgccgtcagtttttcaccgtcagttgcgacaattcccgcgccttcctgtcctctgtgctggaggctgtgcaggccgtaatatgtgatctgcggagcttcttcatgtccccagatgccaaacacaccgcattcttcattcaggcctttgatttcagcaagcatggaatagctcctttccacgcgcgctcaagttctttcgtttgcgcgtgaaccaattgttgtccgtcctggttttgaatcgccagaagtccgtcagccgttacctcaccgatatgaaccgcatcggccacagccgcttcaaacgcctcatggtgttcttttttcactgaaacgacgaagcgggattgagattcagagaataataatgccgcttccccttctacagtcacgttggcgccaaggttttccgtcgtcatgacgctttctgcaatcgctacgcctaagccgccttcagacacatcatgcgctgattgaacaaagccttttttaatcgcgtcaagcaatgctttttggcgtgacagctctatatcaagatcgatttgcggcgctttgccgtaaatgcgcccttctgtcattttttgcagttcgcttccggcaaactcaggttttgtttcgccgatcacgtatacaagatcccccgcttgtttgaaatgctgtgtcgtaatatgagcggtatcttcaattaagccgaccatgccgataacaggcgtcgggtagatcgccgttccgttcgattcattataaagtgatacgttaccgccgatgacgggagtgctgagaacattgcacgcctcgctgatgccgtcggccgctttttcgatctgccagaaaatttcaggtttttccgggtttccgaaattcagattatccgtgaccgcaagcggttcggcgcctgagcatacgatgttgcgcgccgcttcggcaacggcgattttcccgccttcttcaggatcaagatataaataacgggcgttgcaatccgtcgtcatcgccagcgcttttttcgtgccgcggattctgagcactcccgcgtcagagcccggagcgaccaccgtatttgtgcgcaccatgtagtcatattgatcgtacacccactctttgctggcaattgtcggctgctgcagcaaggcaaaaagcgtctctgtcccatcttttacttcaggcgcgggaacttctgtttcctgaaactcgcggtagtacgcgggttctgctgacggcttgtggtatacaggcgcttcttccgccagcgcgtcaaccggaagctcgcaaacaacctctccgttatggcggaggcggagcattttatcatccgtaacatgacctacggaaaccgcttcaagatcatatttatcaaaaatatcgacaatttcctgttcacgtccgcgttcaatgacgagaagcatgcgttcctgagactcggaaagcatcatttcgtaagcggtcataccagtttcccgctgcggaatgagatcaaggttcatttcaatgcctgagccggctttgcttgccatttcagcactcgaacttgtcagaccggccgcccccatatcctgaatgccgactaaggcgtcgcattggatgacttctaggcatgcttccaggagaagtttttccatgaaaggatcgccgacctgcaccgcggaacgtttttcttcagatgaatctgacatttcttccgatgcgaaagtagcgccgtgtatgccgtcgcggcccgttttagcgccgacgtacatgaccgtgttgccgacacctttcgcctggccttttttaatatctttatgatcaattaagccgacgcacattgcattgacaagcggatttccctcatagcttgcgtcaaactgcacttctccgccgaccgtcggaattccgatacagtttccgtatcccgcgattcccgccactacttcttcaaacaagtacttcacacgaggtgaagtgagctcaccaaatcgaagagagtttaatacagctatcggacgggcgcccattgagaaaacgtcacggatgatgccgcccactcccgtcgcggcaccttggtatggctcaatcgctgacggatggttatgagattcaattttgaacacgaccgcctgattgtcaccgatgtcaacgattcccgcgccttcaccgggaccctgcagcacgcgttcgccgctagtcgggaatttgcgtaaaaccggttttgagtttttatagctgcagtgctctgaccacatgacggaaaaaatcccgatttccgtgtagttcggcaatcttccgataatagattcaatgagtgcgaactcgtcatcactgacacccatttgctgatagagtttctcttcttttatttgttctttacttggttcaagcagtagcgacatgagtttccctccaatttttcacgatagaccggaacaatgtaagaccgtctgcgctgccgagcagttcatcgactgcgcgctcagggtgaggcatcatgcctaatacgttgcctttctcattcacgacgccggcaatgccgctgacgcttccgttaatatcgccgccgtatgtgaaggcgatttgattgttttcttttaatctttcaagcgtttcgtcatcacagtagaaattgccttcgccgtgggcaaccggaatcgtaatcgattgtcctttttcataggaagatgtgaataacgtaccgccgttctgcacgattaattcaaccggtcggcagatgaactttaaatctttgttgcgtctcatcgcgccgggcagaagtccgagctcctgcagaatctggaatccgttgcagacgccgagaaccggttttccttcggcagccgcttttttcacagccggcatgatgtttgcgaatctggcgatggcgccgcatctcaagtagtcgccgtatgaaaacccgccggggatgagcacgccgtcaaatccgtcaaggcttgtttcctcgtgccagacatactcgacttcttcgccgagttcgtcctttacggcgtggaacatatcaatatcacagttggagccgggtaacacaatcaccgcaaatttcactgtgcgacaacctcctcaacttcatatcggtagtcttcaatgactgtattggcaaggagcttttcacacatttctttcacgagcgcgtcaagatcgcggtcagatttttcaatcgtcagctccatatattttccgatgcgcacatcctgcacttcattgtaggtcatgctgtgcaatgcatgctgcaccgcgcttccttgaggatcgagcacactttcttttaagctgacataaactttcactttatacattatgaaatgcctcccagtcttttgaaaatctcttcatatgcgtcggttaagcttcccaggttccgtctgaacaaatctttatcgagcttttcgtttgtgtctttgtcccacagacggcacgtgtcaggagaaatttcatccgctaaaagaacccgtccctctgcgtctaagccgaattccagcttaaaatctattaatctgacgccgcagtcttcaaaaatatgctgcagctcttgattcacctgttttgtaatcgatttgatcgtttccacctgctcaggagccgccgcttttaaaagccagatatgatcttctgtgatgagcggatcgccgagtgcgtcatctttatagtaaaattcgataatcggctgcggaagctctgttccttccgggatgccgaggcgtttcgacatgcttccggcggcaacgtttctgaccacgacttcaaggggaatgatgctcacttttttgataagctgctctgattctgaaacacgctccacaaagtggttgtcaattcctttggcgtgcagatgtttgaaaatcaggcttgaaatttcattgttcagacggccctttccgctgatctccgcttttttctcaccgttaaaggctgttgcggaatccttgtagaccacgcggagaatctgttcgtcttcagtttgataaatccgtttcgcttttccttcataaagaagattattgttcacaatattcacggaaggcctcctaacccgaatgttgggaatattcaatctatggcggctgaagaagccgcctccggctggcttcttctataaacctaaacgctcaaagatcaagtcgacgtttttcaaatgataattgtagtcaaagcaatcggcaatctgttccggtgtgagacgggacgtgattttttcctccgcttcgacaagctggcggaacggcacttgtttttcccacgcttccatcgctttcggctgaaccgtgtcatatgcttcttcacgaggcagacccgtgtcgattaaagcgagcagcacgcgctgagagtagattaaaccgagtgtgcggtccatgttgcgtttcatattttccgggaataccgttaagtttttgacgatattgctgaatcggttcagcatgtaattcagcgcgattgtcgcgtcaggaagaatgatgcgctcagctgatgaatgagaaatatcacgctcatgccataacggtacattttcgtatgccgtcagcatgtacccgcggatcacgcgcgccatgcccgtcatattttccgacccgatcggattccgtttatgaggcatagccgatgaacctttttgtccttttgcaaaaaactcttccacttcacgagtttcactcttttgcagaccgcggatttccactgcgaatttttcaatgctcgtcgcgatcaaagccagtgccgccatgtaatccgcatgacggtcgcgctgtaatgtctgagtggaaatcggcgccgctttcaggccgagtttttcacagacatactgttctacgaacggatcaatatttgcatatgtgccgaccgcgccggaaagcttcccgacttcgatcccttcttttgcctgcttgaaacgttcaaggttgcgtttcatttcttcatgccaaagcgcgagtttcaggccgaatgtcgtcggttccgcgtgtacgccgtgcgtgcggcccatcatgaccgtgtatttatgttctttcgctttttcttttataatgtcaacaaatctctcaatgtccttgagcaagatctcattcgcctgttttaatagataggaaagagcggtatccacgacatctgttgacgtcaggccgtagtgaacccattttctttcttcgcctaatgattctgaaaccgcgcgggtgaatgcaacgacgtcatggcgcgtatcctgctcgatttccaaaatgcggttgatgtcgaaagacgcgttttcgcgcatgactttgacgtcttctttcggaatgacgccaagctcagcccaggcttcacaggctaaaatctcgacttccagccatgcctggtatctgttttcgtccgtccagatcgcggacatttcaggtcttgaataacgttcgatcattatgctcgtcctccgtctcttttcatccatatgttcgtgatgtcctgaatccatgtttcatcaggcttccgtaaaaatgtcatatgccccattttgcggccttttttaatctcatgttttccgtacaggtatagtttggcttcctttaaaagctccgtatgctcctccgcaagcttcacttcatcaccgagcagattcaccatcattcccggtttgagaagatcggttctgccgagaggaagtccgcagaccgctctgatgtgctgttcgaattggctcgtttcacaaaggtcgagcgtataatgcccggagttgtgaggacgcggcgccagttcattaatcaaaaggtctccgtcttccgtgacgaacatttccaccgcaagcggcccgacaagttccaatttctccgcgagctgaacggcaagcgcctctgcccgcttttgaaccgtttcctccgctctcgcgggtacgatgctttggaacagaatattatttttgtggatattttcagcagccggaaaggttgaaatctcaccgtgcaccgatctcgtcacgataacggaaagctccatccggaatgatacccagctttccagtatgcacgtgccgttttctaacagcgcagccgcttcatctgtctgtccttcttccttaatgacaaattggcctttgccgtcatatccgccgcggcatgttttcagcaccgccgggagccccagtgcctgaacggcttcctcaagctcccgtccgctgtttacgatccgataaggcgcgacttgacagcctgctgactggatcgcctttttttccgtttctctgttttgggtgatgagcagcagctcgcttccctggggaagatatgcatgttctttgagccagttgagcgcctcgtaatcgatattttcaaattcgtaggtaatgatgtcactgactccggccaatttttgaatcgcttcacggtcattgtactgggcggtaatctcaatatcggcgatctgtccgcatggcgagtctttcacgggatcgacgacagcgactttatagcccatttgttttgcggcgacagccatcatttttccgagctgtccgcctccgataatgccgatgacggcgccggggtaaatcgtttttttatcagacaagctgatcactgctttccagcaccgtttgttttgtcgcatttcttctcgcctctagtttatccgcaatgtcatcgtcaaatgccgacaaaatttgcgcggctaacagacccgcgttcactgcgcccgctttcccgatcgcagtcgtcgcgaccggcacgccgccgggcatctgtacgatagacagaagagaatcaagcccgttaagcgattttgtctgaaccggtacgccgatcaccggcagcgtcgttttggccgccgtcattcccggcagatgcgccgctcctccggctccggcaataatgacttttaagcccctgtctctggcgctttctgcatattcaaacatcaaatcaggcgtccggtgcgcggataccacctgtttttcataaggaatgtgaagttcgtcaagtatgtcgcatgcatgtttcattgtctcccaatcggaggtgcttcccatgatgattcctgctagcggctgcattctgttcccaccttctcatgctttgtttttcagaaaaaaaagcccggcttatattgcaactatgaggaagcaatacaaaccgggcatggcgcgcgtatcgtcagtcgttcgcttctgcgatatccatgtcagctgtttatcactttcctgcatagtccggccgtttacggcagccgggtagaaacttatgggccatattcccaagattatatgaggtcgtgttttgatttcatgtttatcttaacaacggacttggataatgtcaacgacattatcgaacgatataaaaattctttcttttaatgttcgtgtttagatcaatttcccttcaaatacgatttttttcccgcaaggaacgacttgaattgatccattttctttcttttctgtaaagatcggctcttccatccgccggacgggcatatagccctcttccttcattaaagtgagaatggtatcaatcgtttcatgttccgttacttcaaaccgtttcttctttggctttgtcattccttaattctcctctttttcactgctttcacccagaatccgccgtggatcgctttcggctcaaaagcgatgataaacgctttttcatcaagcgttttaatcgtatcataaagctgaagctcatatttgcgcggcgtcagaatctgcatggcggtccggtctccttcaagtccgcccgcaacccagcttgtaaccccgtatcctttttcccggagctgtttcggcaggtccagatcaagctctttcgtaatgacgttgactgttatgtagccgagcgccagtttttcttcaattttcattcccactatgacgccgaggccgtagccgagcgcataggcaatgacgttttgaatttgattcagattgccgagcacaagactcaggccggtcacatacacaaggatttcaatcgtactgatgcctgcggcgaaatagcgctgtccctttaatgtcagaatcatcctgatcgtaaagaaagagacatatataatgttaatgatgagaataatgagaaccatacctatactgttggataaaatcgtctgcatcactgattcccctcctctgatactttgaaaagcatcaatccttcaattaaggatagtttaccctcttttcatcattttcaaaagaaaaaaaagcccgccccgcaaggcagactttcaagctcttatcagtgaagctcggcttttttcaatcgtttgacggcttcatattccttctcaagttcactcagcgtgtatccggacagttcctgaacatggtcttgataaaaccctgagcggatcagttttgtcctcaggtgctgttttttccgattaatggcttctcgcaacaacggggccatcttcatcatcctttccgaatcataaagagtagtgccgctttcgaattgctgttgctctcatcatatctcggccgggtcctcaaaacaacacgctttattagaaaaatttgtaaacattgtgaaagacaaatttcgacttataaagggatcagcgaagcagtaaagtactctgaaataagcggccatgtcacagccgtaaaaacgagcatgatgataaccgccgcggaaatacagtacatcacgtcagccgcaggcttttcagccgatttgtatagaatctgcacaaactgcaccatcgccgaggcggccagaaacaaggtcagcgccgtaaacaccacggtgatgaccggcagattcaataccgcgaaaatcatccacacgatagagctggcgacagccggaaccaaaagcgatccgacccccgcggccgcatcccgcatcgtgattttctgtttcatcatatagcgagatacaagccagaccgcgcccgccgcagcggcaaaaaagacgagcgtatacacgagaacgacggtaaagccgtcaaaaaacgtatgatgccgctccccgtatccgagaggcctttgctggcttgccctcagctgaaaccaatttccgattgagaaaaagatactgaatacaagcattgaaataagagcatatttaaagcgggaaaagccgtcttccccaacgaccttcaccggtgatgtcaaaatgcgcagcgcgaaacggcaataacgtttgaccgcggcccatgcagaagcgagtttttccgtaaaagccggagccgggcgccgttccttttcttttttcttttgcttttgataacgtcccgcatttctggacattctcgacagcggttcttcatcagttccctgatgctgtttttcttcttccaacgtttcttttctttcttccgtcatgtcagcaactcctatcaaaaaaatacggcggaatttgttaaacaagaaaataaaacacttatataaggtaccgaagcgtcctcaaacagtcaagcggttttcttcacccggacacccacatgacgttttatagtatgtattggttttacggaataggacaaaaacaaaaaaccggcttaactcagccggtttttccgttatttcaagaagatgaaatacaggataaagatgacgaacagcccgtacataatcgggtgaacgctttttccttttcctttgcagatcattgtaatcgggtagaatataaaaccgatcgcaatccccgtcgcaatgctgtacgtcagcggcatcataatcattgttaaaaatgccggcacagccacctcgaatttatcccaggcgatcttaccgagcggcgccaccatcagcgcgccgacaataattaaagccggagccgtcacattcgtggtgacaactgacagaagcggcgagaaaaacatcgccagcaaaaagagaatgcccgtcacaacagccgcgaagccggagcgcgcccccgccgcaacgcctgagctggattcaacataagaagtcgttgtagacgtaccgagtacggctccgataacgattgatgttgaatccgccagaagcgctcttcccgcacgcggaagtttgttttccttcatcagcccggcctgtgtcgctacagccaccagcgttccggccgtatcgaaaaacccgacgaacaagaaagttaaaatgacaatcagcatttggacggagaagatatccggaagatgcatccacgcctgtccgaaagtcggcgcaagactcggcacgctgccgacaatgtgcgtcggaaccggaatcagtccgcagaccatgccggcaaccgccgtcagaagcattccgataaatacgccgccgtttacgcgaagcaccatcagaatgaccgtcacaataacaccgaaaaccgtcagcagtacagggccgctgtgaatattgccgatagacaccaaagtcgatgagtttgcttcaataatgcccgaaccctgcaaaccgacaaatgtgataaacaaaccgatacccgcgccgaccgctaatttcagctcaggcggaatcgcattaatgattttttcccgcaatcccgtcagcgaaagcgccacgaagataattccggaaatcaagacgccggaaagcgcagcctgccatgaaatccccatgccgaggacgacagagaaagcaaaaaacgcatttaatcccatacccggcgcaatcgcgatcggatactttgcaatgagccccattaaaatacagccggccgcagatgccaaggctgtagcggtgaacaccgcgccctgatcaatttttaatgcttcgggaaatcctttcacaccgtttaaagacaatgtcagcggattgacgaacagaatgtacgccattgacaaaaaggtcgttaaaccgccgatgatttcattacgatagcttgtccccagcacatcaaactgaaaaaattgcttcaagccaattgcctccttcattctctcccatttattctgcccgttatccgccaaataaaaaacgccccaaatacatttgggacgcttgactacatacgttcagtctgaataaataagaatggattatttatatcaaacgattgagattgatccgtagtcaagccatttacggtagcttggtagaaacttgcgggccatatccccgccattatacgatatctgcatatttgatttctgagtctattgtatcaattcaattttgaaaactcaataaaaaaaacgaacaatcccgttaaaaaaatttggtttattcgttaattgaccaaaaatggaagacggcaaaacccgccttccagacatcattttccgtccgcaggccggaccggcaccgcgaatgtgatccccttgtcatccgccagcaaattcataaccgtttgatcgacgtacaaagcatatgaatcgaatgaaaaatcgcgcaacgaatagtctttatcggatgaatcatccaattcaaaaacggattccatttcacccgttttaaggttcgtgactttcgccttattccctttcagataatagccttttttatactcattaagcgatggccaggttttcatttttttcgtattgccgagaccgattgattcaccgacattgatcagctgatcttcatccgccttgctgtaattaattcctgtgaattgataaccgacgatcacccgtctgccttgctgtttgatctttttgatggtaatgccgacatgatgatgtttcgtttcataactgacaggcagttttgttttcagagggacgatttctcccggctctgattctgtttttatatcgcccgttatgaaaagtgttttcgctttcgggtctatcggtttgctgaattgagtttggccgcgtattcttttcccgccgccaggaagattctttctgccgccaagttcaatattcgacgccttcatttcataatggtttcctgcatcatccgttgcttcgtcaatcgagatggcatcatttttagctgcattttgaaagtcgactgaatacaggagagccgatcccatcgttccgttttccccccggatatcgaaaaagcggtataacccgtttacattcacagctttcgttccttcaagagaaacggacttttgttttttaataggtagtgaaaagcgccagtttccggggatatccttgatttgtgtaatgacaagcggaagcttatcaccgtctttcagctttgagccgtccgtgaacaggcgaacctgccccgcgtaccgcccgtctttcatttttttcatatcactgctgtcataatcctctgctaacatattccgtggatctttataatcaacttgaaaagagatgctctcctcatcagatttcaaattgtcaacggtaaaattgtaaacgagctgtccgctgtcgtaatacacacttttcactgtaaccgtaatcccgcgcgattccgctttctcgttcagttttgtcaccaaattgcttttaaacagcgcagaacctgccttatcctgaaataccctgtaaatctgcccggcaacagggatgtttcccatagccgtattaacggagggcatgaataagcctgaggacagatacagaataaacaaagcagcagcaaccgcgaatccgtttatcacttttcgtccccatctccgtctgacggcgccttcttttccggcacggacagcggcgctgtgtatcacgtttttcaattcagctttcggcacgtcaatgtcctgatacaattgcttcatttgatgcttttccatatatgtttatcctccttttccagctcctgcttcaatgcttttctcgccctgtggagatgcgtttttacagtgccttccgccataccggtctgttcagcgatcatagcaatcgagaaatcttgaaaataataaagctgaatggtcagctgtatatgttcgtcaagcgtttccaaggcattccgaagatctatgtattcttcaatgttcttattctccgcgcgtgtatcatgttgcggctcaaacgggatgacgtctccgtgctttttcctcatcgcaaaaatcgtatgaagcaaaatccggatcagccacgttttaaaatatttcggctccttcagctgcgcgatatgaagaaaagccttgtaagccgtttcctgaacagcgtccagtgtatcttccttgtgatgcaaatagagataagctgttttatataaagtctcctgatgagctgtgatcagtttttcaaaggctgcggcatcaccttttttcgcctttttgatcaatcgttcttccttcaccttatccacctcctatgctgttagatatgaatcagggcaaaacggtttcaaaaagatgaaaaaaaacgcctcttttttaaaagagacgtttttttatcttgatttattcccattcaatgctttctaaacagtataagaattaatttattgaatatcaagccttttggggtttgtagttccttgatttagaagttaccattaaaaatattgctcccccgtgttctgaatattatgggagggggtaaatactgtgatttagtgttttagttgaccttataataaaaaaagcgcactaaatcgaattgaaaggtgcaaaaacatgattacaaatcaacaattagtcataaacaatttggaagaaaaattaaaatcatttacccatacagttagcggagagcttacaaaggaagaagatttcatcatagcaaatacaaaaatccccactgatacattcaatgtaatattaccgaaatctccaaatatcaaaaatacagttaagatcagacatggaatcgataatttttcatataaaaaatatccctttagtatatggattgatgctcagtatttaactgaggattggacaaaacttatacaagaatatgatctaaaagaagcggaacgtaatgtaatgatgaaacttgaaaatactcttaatgttgggcaaagaatttcccatcagcttatgattactgctgtgaaaaatgatgaagaacttttaaaatatatagacatattcatgagcttatttgagggtacaccagaaaaagatgcactagaaagttattttaatacgttttcacaagtaaaattaggttcagaagttcagatgtttattggatgcatagatgaaatgcctgtaactaccggtttattaatagaaaccaaagatagctatggtatttatgatgtgatgacaaaagaaacatttagaggtaaaggaattggcagtgaaatgtttcaatttcttctaaatcaaacaaaggataaacaaaaaccagttgtattacaggcttcagaggatggaaaaaatatctataagcgatttggatttatagatgtcggagaaatggttgtatttgaatagagggtttctttaatttgcttaatttgaacaaactttattctaaaacaacattaattattatcccattgtggaatactttttctttaaaattcacggttcaattaataatatcggatcaattgttgctataaaagaaaaaagagcttagaacccttataaaccaaggattctaagcttcttttgactattcccactcaatcgttgcaggcggcttgctcgtaatgtcatacacgacgcggttgatgtgtttcacttcattgacgatccgtgtcgaaatcacttcaagcacatcccaagggatacgcgcccagtcagatgtcatgccgtcaattgatgttacggcacggataccgattgtgtaatcatacgttctcgcatctcccatgacgccgacgctgcggatgtcaggaagaaccgtgaagtactgccagatgtcgcgctcaaggccgtggttcgccacttcttcacgcagaatcgcgtctgattcacgaacgatctcaagtttttcttccgttacttcgccgagtacgcggatgccaagtccagggcccgggaacggctgacgccatacgatatcatccggaaggccgagctctgtgccaagcgcgcgcacttcgtctttgaaaagggtgttcagcggctcgatcagttcaaactgcatatcttcaggaagtccgccgacattgtgatgcgatttgatcgtttgcgccgttgcagtaccgctctcgataatatccgtgtaaagcgttccttgcgcaaggtaatcgatgcctttcagcttgtccgcttcatcatcaaacacgtaaatgaattcgttaccgatgattttgcgtttttgctcaggatcagaaacacctttcagcttgtttaagaatctgtctttcgcatcaactttaatgacattcatattaaagccttcgctgaacgttttcatgacgccttccgcttcgcctttacgaagcaggccgtgatcgacgaaaatacaagtcagctggtcgccgatcgctttatgaattaaagcagccacaacagaggaatcaacaccgccgcttagcgcgcaaagaacctgcttgtctccgactgtttcacggattttttgcatttcgatttcgataaagttttccattgaccatttgccttcacaatcgcaaacgccgaatacaaagtttttcagaagatcattgccgtattcagagtggcgcacttccgggtggaactgaacgccgtaccaattcttgtccgctttgctcatcgctgaattcggacagtgatggcttgttgcgtcaacagtgaagccttctggaacttctacaaccaaatcgccgtggctcatccagacaacctgttcttccggaagatctttgaacaagtcaggagttccttgaatctgaatgttggcttttccgtattcgcgctggcttgccgcctcgacttttcctccgagataatgagtcatcagctgcatgccgtagcagatgcctaatacaggaatatcgagttcaaagattttttcgtcacagcggaaagatccttcatcatatacactgttcggtccgcctgaaaggataattccttttggattcatttctttgatttcctcagctgtcaacgtatgggggtgcagctcgctatatacgccaaattcacggatccggcgggtaatcagctggttatactgactgccgaaatcaagaacaagaatcatttcattcactaacttcgtcatggttgtcacctaatctcctctaagtttttgacacagaaaaaacggaggacaaacgttcagccctctgtcgcgcaagacttgtccggaagcccggctttttaacgctcccgggctcccatttaacattcatttattctaacaacaggacgatatgcggtcaagactatcttgttttaattatattttcccacaactgtcccgattcattccaaagctccgctgcattatccctgcggtataaggcccgctcatagcgcagcgtcagctcggacatgtcgtttgtatggtacgcctcgtcaatcctcgcggcaaaatcgcgcagtgtttctccgtctcccctgctgaatccttttcgtttcagctggcggagcagcgcggcatatgcgtcgaaaaagacgtcttcatccgttcgccgcttcaatctggctgctgtaacgtgcggaatccagcgcgcccggagcagccaggcgagtgccgccgcggctgaaatcacgataacgatggctgcatacggccacaggtgtgccgcggttttgttgcggatcacaggctgcggtgccgcgctgtgatcccgctttttcggcttttcctctttttccggctttgtttcctgacgctgcttgtcagacggttcatccgaatttcccgctgagcctccgctgtcttttgccgcggtatgattttgctctgacgtaaactccgtcggattggtgaagccttttgtcggctcaaacgtcacccagccctgatcgggaaaatacacttctacccacgaatgggcgttgttgtttgtgacttcataaatgtggccgttatggtcgcctgcccctttatattcgccggatgtatagcccttcacccaacgggcggggattcccgcagagcggagcagcacggccattgccgatgaaaagttatcacaatatcctcttttcgtttcaaacagaaattgatcgacataatcctgattgtgctccggaaccgcgacatcctgtgtattatacgaaaatgcggaagatccgagataatcctcgatcgccttcgctttatcgaacatattatgatgatcccgcgtcagtctgtccgcaagctgtctcactcttttcggaaggctgtcggggacctgtaaataccggtcattgaattgattctgctcacggtatcgtttcactttcacttttctgagatcattcagcttaaagacgggcgcctgaaaagtcaccgtgtaccgtcccatattgcggatgttgcccacttgttcactgaccggcgtaatttgctcggtgtttccgttcatttcaagctgaatcgagtgcttcggtttaatattggagacgccgatcggatacatgacgtgattatagagataattttcatcaatggacacctgtgccgtataccgtctcgtctgcacactccggtcaaaccatatatcttccacgttgccgccgttcagtttataggacatgccctgatcggtctccacccagcctttccccgtgtatgtatccttcgtttccacccggaagtacgcccgttcttttcccttccatgtgaaaaccggcgtatcatcctgctgaaaagggccgcccaatgtttcatcatgattgccgtagccgattttgctttcggcggcgggcacttctttgtggtttgttatttttttaagaaacggcacggggtccggccagttcgggtctgatttcggagccgccagaccgaacacgacggaagcgcagataaacagcatcagcggcagaaaccatttgagtatcaatctttttttaaacgctatgtgttccgtaagccggatgcgctccatatacaaaagccccatcatcaaaaagccgataaagacgatccggatgacggcgtacgcggcatcataaggagtaaacgtatcaagcacggtgatatacgccaccgtcatgataaaaaagaataatattttccgctgatagatcacccagtaatgcagcaaatacacgagcagccataaaagcacaaaaaacagcaatgtgcggaatgacggattcatgtcattccatcttccggacccgatgtggcgggcattttgcatcacgtcccgcaaaaaagaaacgagccattccggctgaaaaaccgaacctttataaaacaagatgtgaatactgatcaacgtaaacagaatgcaggacggcacggtgacgtaccacctcatccggaagaatgacagcagaaatgccaaaccgataaaaacgatgaaaaaaccggtatgttttgtatctgtaaaattgtgcagcggcctgagccattcccataacaataaaaaagcgagaaaataaaacagcagcagactcagcctgcttccctggttctcgtcatgcggcatggcgcgccacctctctttctaaacaacatgggacacccgtttgtccctgatcatttgcaccttaatatttttttgagcgaagatgagagcgagtttccgttctttctccgaaagcgcggcattcgtttctttcgccaaaaacaccgtcatgtcagcacggccgggctcagcctgtttgagaaggtcttctgtaagactgcccgtcacgacggcaatggaagctttgcggacgcgcggatccgccagctcttttcctaaacgcccgcctgcatcggcttcttccgattctgaagctgatgccaggtaacgcagcatctttctgaaatgccggtctccctcccggacgggaaatacggtccggtcgctccccaatgaaataaatcctgcgggagagcccttcacaagcgccgtgtaaagcagggatgccgaagctgataccgcggcttcaaacgatggggacggcctgcagtccaaaaggagagtcatattcacactctgcagcgggtcaaattccttcgtcatcagctcatttcgccgcgctgatgttttccagtcaagtgcggaaaaccggtcgcccggctgataatttctgacgctcgcagccattgcggagcggtgtacctgaaacggagcgccggcagccgcaccctcttctccggatgcggcctgcggcttatagtgaacagacccgtacgccgggaaaaccagaaccgtatccgtaacggaaaacgacgccgtcttgtccaaaagcccgagaacatctcccgtccgcactcttatcgtatgtaaatgatgctctccgcgcggcacctgcggcagctcatattgtaacgtcagcttcctttgaaaccacgggaacacgagctgtttcgcactgcgcctctcgccaagcgtttccggcatcacatcttcaatgaccatatatgtcagcggaaacggcaggcgcctcgtcagcctgatggtgacagacagcctgtcgcctgaggttaactgggcggaggacacgtcacgcgtcacctgaaacgcccgcagcgggtacacagcgaccagcccggcgtaaacggtaaacggcaaaaacgcataaaataaaaaccagctcacaaatccgccctgaaacatggcataagaaaagacagccgccgtcagtaaggccaacataagcagcttccagccatatagaagccaatgcatcttctttctcattagcggaccgacatcctttgaacgggcactttttccgtttgcatgatgtcttctataaccgcttccggggtcacatcgttaaatttcgcctcggcggtcaagatcattctgtgcggcagcgtatacggagccaaatactggacgtcatcaggaatgacgtaatcgcggtcatgaagcagcgcgtacgcctgcgcggctttcattaatgagattgaaccgcgcggacttacgcccagatgtacggacggatgccggcgggtatgctgagtaatgccgacgatatacgctttaattccatcatccacccgcacctgctccaatttttgctgaaggctgataaactgttctttagaaatgacgggctcgattgtttcaagcggattgcgcccttcctgcaaagacagaacttgaagctcttcctcggcagtcggatagcccatgcgcagcttaaataaaaaccggtcaagctgggcttcgggaagcggatacgttccttcatattcaaccgggttttgtgtggccatgacgaaaaacggctcagccagccgcattgtctttccgtcaatcgtgacattcccttcctccattgcctcaagcagggaagactgcgttttcggagaggttctgttaatttcatcagccagcacgatattccccatgatcggtccagggcggtattcaaattccatcgttttcgtattataaatagagacacccgtcacatctgacggcagaagatccggcgtgaactgaatcctcttaaagtcagctccgatcagcttggccaaagcgcggaccatcatcgtttttccgactcccggcacgtcttccagcagcacatgcccttttgcgagaatggcggccagactgagtatggcgatatcccgttttcctatgatgatgttttcaatatgctcaacggctttctccagcagcggatgcagctcttctttataagccattcttctcctcctagtcatctctcaaatttcaattatcgtaacctaactttaccacaaaatataaacagtataaaaaaacgtttccagcgaattgtttccagtctgaaaaaggaaaaagctccctttagaaaggaagctttatttcagctggagaggctccatatgaacgtgtgaatggtcaatggcatgttcctctttcatcttgcgttctacctcatttgcgatctcatgactctctttaatgttcagatctgacggcacttcaatgacgacatcaatatgaacggagctgcccagatatctcgctttaatatcttttaaacggctgacgcccgcaatctgttcaatcgtctttttataatcagaaatatgtttgacatcaaaaccgtcagtcagcgaatgagaggattccttaaaaatatcccacgcggttttgcagatgatcaacccgatgataaacgcggtaaccgtatccacccaagccaaatggaactgtgaagcaaaaattccgataaacgtgccgatactgacgagcgcatctgatttattatcagcggccgcagctgaaagggcctggctgtttacctttttggcaagccctttcgtatagcggcagaccatcagcatcacgacggcgctccccgcggccgtccaggcggctatcatatccggcgtttcctctttaacggaaaaaatagattgcgcggcgctgaacagcacttgcattccgacaaacatcataataatggaagcgatgagggacgcgacggtctccgcccgaaaatggccgtaaggatgatcttcgtcaggaggtttctgagagatgcgcaaaccgatgaaaacagccgcagatgccacgatatcagtcgtattatttaaaccgtcggcctgaagcgcttctgagtgaaacaaataaccgatcacaagcttcacagccgacaatgccgcatatgcgccaatactgacaatcgctccggtttcgccttttttcaattcatgatatctctccactgaaaatcctccttcccgttcaatttttccttcattatcatacaaagcgaggacacagtgggtctatagaaacatgattcactttccacagaaaaatagtaagcatagaacatttatgcactcaggaaacttattttcattcacaaaacccctctcatcccaatcgtatcaaggattctcgccaacccacgttcatggaattattttcaaaaccattaaaacacagaaataacagaaaattattttttttccttccggcactttctgctgtacggacgagaaaaaatgtcatattttcttacatcattttcaactgcctgtggcatttatgatagaataatacttgtcggaatattcagcataaacaaaccaaaaggaggcaaagaatgaatcagcctaactctttatcaaagggattaaaaacccggcatatgactatgatttcaattgccggcgtgatcggcgccggattatttgtcggaagcggatccgtcattcattccaccggacccggagcgattgtctcctacgctttagcaggattattagtgatttttattatgagaatgctgggggaaatgtcctccgtcaacccgacaagcggttcgttttcacagtacgcgcatgacgccatcggtccttgggccggttttacgatcggatggctgtattggtttttctgggtcatcgtcattgccattgaagccattgcaggcgccggaatcatacagtactggttcccgggcattcccttatggctgacgagtctgcttctgaccgtgctgttaacactgacgaatatttattcagttaaatcgttcggcgaatttgaatactggctttccttagtgaaggtagcgacgatcgttgtcttcttaatcgcgggatttgcgttcattttcggaatcgtccccggcagcaaaccggtcgggctggaaaatctggcgggcagcggcggatttttccctaaaggtccaagttccgttctgctcggcatcgtcgttgtcattttttctttcatgggatctgaaatcgtcgcaatcgcagcgggagaaacgtcaaatccggtcgaatccgtcacaaaggcgacccgctcagtcgtttggcggatcattattttttacgtcggttccattgcggttgtggtcacactgctgccgtgggattcagccaatattttggaaagccccttcgttgccgttttgagccatatcggggttcccgctgccgctcaaatcatgaattttatcgtcctgacagccgttctgtcctgcctgaactccgggctttatacgacgtcacggatgctgtattcactggcggagcgaaatgaagcgccgcggcgttttatgaaactgagcaaaagaggcgtaccggttcaagccattatcgccggcacctttttctcctatattgccgttgttatgaactacttttctcccgactccgtatttttgttcctggtcaattcatcaggggcgatcgcactgctcgtctatctcgtcatcgccgtctcacatctgagaatgagaaagaaaatcgaacggacaaaccctgaatctcttaaaatcaaaatgtggttttatccgtacttaacctacctgacgatcatcgccatttgcgccatcttgttatctatgctgtttatcagttcaatgcggtctgaatttctgctgacaggatttattactctgctggtacttgcctcatatgtattccgcaaaaaacaaaaaccgaaagagagcgcttccgaaagccggattgcgcaataaccgcaaacacccccctcaaaaaagggcgggtgtttttttaaccaacctgttcaaggcagcattaactgtagtacaggatttcaataaatgataaggacaggatgaaaaatggcactagaaaaatttgcagatgaactgccgattatcgaaacactccagccgcagaagaaatcagacggcagcacgtattatgaagtcacgatgaaggaatgctttcacaagctgcaccgcgatctcccgccgacccggctgtgggggtataacggtttatttcccggcccgacgatcgacgtgaaccaagatgaaaacgtctatattaaatggatgaatgaccttccggataagcattttctgccagtggatcataccattcaccattcagaaagcggccatcaggaacccgatgtcaaaaccgtcgtccatttacacggaggagcaacgccgccggacagcgacggctacccggaagcatggttcacaaaggattttaaggaaacgggtccttattttgagagagaggtataccattatccaaacaaacagcgcggggctctgttatggtatcacgatcacgccatggcgattacgaggctcaatgtgtacgccgggcttgccgggatgtatatcatccgcgagcgaaaagaaaagcagctgaagcttccctccggagagtacgacgtaccgcttatgattttggaccgcacattaaatgacgacggttccttgtcttatccgagcggacctgctaacccttccgaaacgctgcccgacccttccatcgtcccgtttttttgcggaaataccattctcgtcaatggtaaagcgtggccgtatatggaagttgagccgcggacatatcgtttccgcatccttaatgcctccaatacgagaacattttctctctcgctcaataacggcgggaagtttatccaaatcggttctgacggcggactgcttccccgctctgtcaaaacacaatctatcagcttagccccggcagagcggtatgatgtgctcatcgatttctccgcctttgacggagaacatatcattttaacgaacggcaccggctgcgggggcgacgccgatccggatacagacgccaatgtgatgcaattccgcgtcacaaaaccgctgaagggagcagacacaagccggaagcctaaatatctttcaacaatgcctaatgtgacatcaaagagaatacacaatatcaggacgcttaaactcacaaatacgcaagacaaatacggccggcccgttttgacgctgaataacaagcgatggcatgatcctgtgacagaagcgccgaagctcggcacaacggaaatctggtcgattatcaatccgatggggggaacacatccgatacacctgcaccttgtttccttccaaatccttgaccggcgcccttttgacttagagcgttataacaaattcggcgacattgtgtatacaggccccgccgtcccgcctcctccaagtgagaaaggctggaaagataccgtgcaggcgcactcgggagaggtcatcagaatcgcggcgaccttcgctccttacagcggacgctacgtatggcactgtcatattttagaacatgaagattacgacatgatgagaccgatggacgtcacggataagcagtaaacaaatatcaccccttttagagaaggggattttttatttatccaaaaagaaaaaataagaagacacttatttgcatatactgtaataacaggaagacgatgcaccctcattggaaatctggatagaaaaaggaattaggagattagggaaaagtatgagacaatgaaggagtgcacgaaaattcataagggaagaagtgactttatgtcttactacaacaaacgtaatcaggaaccgctgcctaaagaagatgtcagtacgtgggaatgcacaaaagaggactgtatcggctggagcagaaagaattttgccggcagtgataccccgacttgccccctttgcggcagtaaaatgatcgacggcgtccgttcgttggtaaatctccaaaacaataatcaaacggcatcaagttagacctcccttttacgagtctcaacatagagaaggcctccatgtctcatgagaggcctttgcgttatcatgtccttttatgatgcaaaggagcattgaacatgaaaaacgatcggcagcagaaagatctgaaggaaatggcaaaacggcggaaaatgaaccttgccgcacagtcattcatcgaaacgcttcattttgccgttccgattctccgttttttcaaatggctcgcctcagccgcagccagctttgttcattaaaaaacacccagcgggcgctgagtgttttttttcatgattggatgacggaaaaactgttgataatgccgttgtcattttcccagactttttcgcattttttcgtatccaaatgataagcataaatggtccggaccttcgcattccgccccgtttcatccttcagacgcttagcgccttttgcttccgccatgaaataaatgatgctgccgtctttagaaaactgaggctgggcatcaatcagcggagcgaagtccttcccgtttgagataatcgtttcatcttttttcgttttgacattcatcagacggatggacgctttttgttccgtccctttttgtgtataagatgtaaagacaaggttctttccgtccggtgacaccgccacgtcgctgataaactgttcaaggtttgtcaaatcctgaaggtgttcgcccgctcctgctgcaaaccggatattcgtcggttcagggtcaatccccttctcatttgcctcatccgttttttgataatcctcttttacggaataatgcagaagcgcaaaatcgttttggctgcggttataaaagaagctgctcacactgtcgtctttctcatcggcggcgggatacagattttcataacgtttcgttttcaaatcaaaagatgcgagacggaaaatatcttcatccgcttttccgagacggaaataaatgtgcgtcagatcctttgataaaaacagactgtcagcgcttgccgttcctttataaagcaccgtcttctttttcgtcttcagatcaagcttatagagacgcatctcattttggtcattattcccgacaaaatagagcacctgatgggcgtcatccagcgcaaacgccggatatgccgaaagcttttcctcgtacagcacgcggccgtcctcgtaatatttcgtcatcagatctttgtctgtaatggaaacaagcagcttgtcatggccgccggagacaacggctttcccgccgccgtcgctttttcctttaatcagtaaaacggacgcgatgaccgccgccgccaaaacggcagccagcaacatccagatccatcgtttcttcttcattatcaatctctccgtcaatcagaaaaagcaagaatcagtgtccttgctttttaagatggtctattttaatagctgtagtgtccggatactcttcctttgcttaatggatatccgagcgctttgaacgctttcgggctgacatccaatacggcattcggcagacggcctacatcatttttgtatacggtgataacctttttcggttttgctttcgcataagctctgattttcgttccgtttctcggaacgtcaaatcctaattttgtcgcgcaatcccagtgccccagttttttaccggaagatccttttttaccgactccattataccatgtaatatttccgttcacttttttagcacttgcatcagaagagtaactgatcgctcccagcgtgcttcctgctaaaatcaataaggctaagaataacttcttcaagctttcgtcctcctgattctttattctaggcaaaattatacaccaagaagacgattataatatttcaatcactttacatgttcattacaacgtgatgagacatgcacataacgacggcacaatttcccgttctatataattccatggtaaattatactacaaaatttaattcattagcgttataatattcatagagtatttctgcattcaatatggactttttataaggcctattgatagttgcataatatgatatattttgagaaatcaggctttaggaagcaggcactttattccttttaaccgtggttcatattgatcatgtacctatactcgtttcaatcagactaggagtgataatcaatgaaagcggcaagatggcacaatcaaaaagacattcgaatcgaaaacattgatgaacctaaagcagaaccgggtaaagtcaaaattaaagtcaaatggtgcgggatttgcggaagcgaccttcatgaatatttgggaggcccgatctttattccggtcggcaaacctcatccgttaacaaacgaaatggcgcccgtcacgatgggtcacgaattctcaggagaagtcgttgaagtgggcgaaggcgtcaaaaattacagcgtcggcgaccgtgtcgtcgtggaaccgatttttgccacacacggacatcagggagcctataaccttgatgaacaaatgggattcttaggcttagctggaggcggcggcggattttctgaatatgtatccgttgacgaagaattgctgtttaagcttcctgaagagctttcttacgaacagggcgcgcttgttgagccgtcagcggtagcgctttacgccgtccgccaaagcaaattaaaagcgggcgacaaggcggcggtttttggctgcggaccgatcgggctgcttgtgattgaagccctgaaagcggccggcgccacagatatttacgcggttgaactttcaccggaacgtcaggaaaaagcgaaagaactcggcgctatcatcattgatccgtcaaaaacagacgatgtcgttgaagaaatcgctaaacgcacaaacggcggcgttgatgtttcttatgaagtaacaggcgttcctgtcgttctccgccaggcgatccagtcaacaaacattgccggtgaaacggttatcgtcagcatctgggaaaaaggagcggaaattcatccgaacgatatcgtcatcaaagaacggaccgtaaaaggcattatcggataccgcgacatcttcccttccgttcttgcattgatgaaagagggctacttctcagcagataagctcgtcacgaaaaaaatcgtgctcgacgatctgattgaagaaggcttcggcgctttaatcaaagagaaaaaccaagtgaaaatcttagtcaaaccgaactaaaccgttcagctgaatatcagacacatccgaaaaagagccgttccggctctttttttcatctcatcgtctttccttccttttccttttaaaaatgatcccctctgcgcaaactattttttaccctgtcccgtctatccttaggcaacagcctatgatacgtattttaaaaaaaggagccctttgaagcaatgaagaacgaaacagccaaagcgtcgcttgtgacgtgcataactgagcgcaaggaagacttttaccggctggcgtacagttacgtaaagaacaaggatgacgcgttagatattgttcaagaatcaattcaaaaagcgctgacatcagtcgaatccgtcaaaaaccccgatgtgatcaaaagctggttttataaaattttagtgcgcacggccattgattttctccgcaaacagaaaaaactgaaagtgatggatgatgaaacgatcgagtttttaagccgaggaaaggaagatcactacaaggacacagaccttcacgaagcgcttgatgacctgccgcatcaatataaaaccattatcattctgcgtttctttgaagacctgaaattagaagaaatcgcggacatcacgggggaaaacatcaacaccgtcaaaacacgcctttacagggggctgaagctcatgcgcattcagctgacgaaggaggatctttcttaatggaaaagagattagaacaattaagagaagagtataaaagtgtgcccattcctaaggaactggacagcattgtcgaaaaagcccttcagcagaaaccgaagaaaaaacgaatcgtgatgtggccgacatccgcggcagtcgctgcggccgtcttatttaccgccgttgtcaatatcaacccggatgccgcacaagccatgtctaaaatccccgtcatcggcaaagtcgtccaagccatcacattcacggagatgaaggaagaaaagaaccaatcaagcattgatgtgaaaacgcctgctctgtccggcctttccgatcataaactcgaagacagcatcaaccggcattatatgaaagaaagcaaagagctgtatcaggaatttatgaaggcgacctcaaaaagcaaaaaaggccacctcagtatttacagcgattatgaaaccgttactgacacagcggatttgatctcaatccgccgtgatatcgaaaaaacgcaagcttcctcttatacgcaaagccgttacatcacgattgataaaaagaatgaggccgtgcttacgttaaagagcttatttaaagatgaccgttatattaaagtcatcagcgaaaatattaaagaacaaatgaaaaaacagatgaaagaagatccgaataaaatatactgggtcgaagataatgatatgtcggagccttttaaagccatccgcgccgaccagaatttttatattacagataagcacaaacttgtcatctcatttgatgaatacgaagcggcacccggatatatgggcgttacagagtttacaataccgacctccgtcatctccaagctgcttgtcggagaccgctacatcagataaagaaagaaaaaaatccatgatatccgcagatcatggattttttctttcgtcccgcaacagccaagatgcacaagggacccttttcatatatcagacgccggacgggggctgaaaagtttaagaaaatcacagcatttcattcattttttctgaaacaaaatccccttccgaatgcgtctaattaacggaacaaatggaagactgtacagaaatctgccatagccatccgcaaaacagcgagaatttccgcacacattattggaggaataccatgtcagacaagtcactgcatcaccgctatattcccggactggatggacttcgcgcctttgccgtcctcgcagttatcgcatatcatctgaattttaactgggccgacggcggtttcattggtgttgatatcttttttgttttatcggggtatttaattacatctattatattgcctgcccaaggcaatgccatcacccttgatttgcgtgatttttgggtgcgccggatcaggcggcttctgccggcggcttatctcatgattatcacgacggtcatttgggtcgtattgtttaacagcgagctcctgcataccgtacgcggggatgcggtctcctcacttttttacataagcaattggtggtttatctttcatcagctttcttatttcgacagcttcggctccccttcgccattaaaaaacctttggtcgctggcgattgaagaacagttttatatcatatggcccttcctgctgcttgcgggaatgtacatatgtaaaacacgggcccggcttgcggccgcggtcatgttcctcgcgttatgttcggcagtcgtaatgagtatgatgtatgtgcccggcggagatccgagccgcgtttattacgggacggatacccgctcatttgaattgctgatcggctgcgctttagctttagtgtggccgatgaaacgattatcttccaaacggctgccgagcagcatgaaacacctgcttcacgggacggagcttgccgcttttgccgcgctgctgctttgcgtcttttacacggatgaatatgaacccttcctgtacaagggcggcatgcttttgatcagcatcaccgcagcggttcttgtcgcatgtttatgccatccgagcagctttttgggacatgttctttcatggaagccgcttcgctggatcggaacgagatcatacggaatctatctttggcattacccggttatcgtactgagcacacccgtgcaggaaatcggaaatccggtttattggcactgcgccgtcagaatcggcgccactttcattcttgccgagctatcttaccatttcattgaacagccgatccgcactgcgggcttccggccatttttacgccgcgtgtttctgaaccgctttttggaatggaagacgtcctctgtcatcagcagaatgtcgctcggcctcattcttgccgccattctcgtatttgcgggcgggctgtcaggaatagccgaagagaaaaaacagccgcaatggacgtacgcgcaaaatgatcagcaagaaaccgccgcctcttcgcacaagacggccgatcacgatcaaccggcaaaagaagatgacagcaagaaaaaacacggcggcgaaaaaacggataccgcgtcagacaaaaacaagaaagaaccaacagacaaatcaaatacaaagaaaaacgaagagaaaaaggaacagtcatctcaaaaaacggctgatccaaaacaaacacagcctcagcaagacgtgctggccatcggtgactcggtgatgctggacattgcgtcatacctgcggcagtccctccctcatgtcaccatcgacggaaaggtaggaagacaagtctctcaagcactccagctcacttcggaatatgcgtcatttaatcagccgaacaaagcggtcatcatcgagttagggacgaacggctatttcacaaacagccaaattgaatcactgatcagctccttttcaaaagccgatatctatcttgtcaacacacgtgtgccgcggcagtgggaaagcaaagtaaacgaatcattgcgccggcaggccgagtcacggaaaaatgtgacgcttgtcgattggcacgcaaaagcattgcagcaccctgaatacttcacaccggacggcgtccatctcatacctgaggggtctaaagcgctgacatccctcatcgttcaaacaatgaaatcatgacaaaaaaaagaggccccaaaaaggcctctttttcgtatatcgtcaggcaagcttctgtccgcaattcgggcaaaaattcgcgccttccgttttcgttccgcagttcggacaaaatttcggcttagccgctccttccgagccgttcgccggtgccgtcccctgattctgctgactttgattttgctgcggctggttctgctgattttggttcatttggttcatcatttgatttgccgcattcattcccatcatcatgcccgccatgtctgaggcggcgccgcttccgctcattttgccggatgacattccgtccgtcatggaaatctgctgatagcggttcacatcgcccaccatgccgtaagaagcgtttttcgtaatcatatcctgaacttcctgcggataattaaagctcataatattgaagcccgtaatcgacatgccgtctccgatcagctgcatatcaagatcttcttgaatcccttttccgatttcaaaggaattcgactgcagattgaacatgtcttttccttctctggtgatccatttcatcaaaagctgatcgagaatagacgtaatccggattttaatgtcctccactaaatagctgtctttgacacccgcaatcttatcaatcaatccgatgtagtcaatgaccttgaagttaaatgtgccgtttgcgcggatcggcataccgcccggcatacctgccgccggaatgttgatggcgttttttgtgccccacttcacggtgaactccttcgtattcacaaacagcacttcagcccgcatgccgctgttaaagccaaacttaaacccttttagtgtagatagaaacggaatgatttctgattcgatatcataatcgccgtcatcacggaaaatcccttcaatcttcccgttgtataaaaagatggcatcctgtcccggccggatgatcagacggctgccttttttaatttcacggttgttccatttatagaaaaccatgtcatctctgaattcttcccattccaccacatttgctaactgatttctgaaaaaacccatgtatgctcaaatcctttacatataatttaaaaacttcccttgcttccgctgtaactcgtgccgcccctcgtgactccgccgtcattgtcattatctttatcaggctttttttctcttgtaacgtcggttcggatatatgtgtcgtgctggctcagcacttcagacgtatcgtgatccatatacgtgctgccggtgacggtgaccttgccgccggaattgtacaccatcacagtgacggcgatgccggccgcggctgcggcaataatgagctgaaaccaccatgtgagcagcagattgtcagacttgtcgtccgggcttttccccatatctttataagccatcttgatgtaggtctgaaacgccttttcataatggcctgcggaaatatctgacgagatcgtatttctgatcgtattcagccggctgttattcaaatacgtctccgcctttttatatccggagataaatacttcccgatttttcatatcaatggtcaaaatcgccgtgcttccgctaaaatgactgtcataaaaatcaccggcgtactgctcgatgtccttaccgcccgttccgtttgcggtaagaatgataaaatcggtatggcgctttgccccgagcttcccggccaattcctcaagtttcttcgtttcatccttcgttaataaatgagcattgtcataaacatattgcttctgttccgcggcagacgccgatgtatgtaaagaaaaagacatcatcagaaaaaggacgaaacagaagagacacgctttttttatcgatactttcatcaaaaaccgcctcctatcataagtgagacgagtcttaatgctaaaaacgcaccggcggttatgccgccgaaccacgcggccacttttccggcactgatcggcggtttgccgacaaccttgcccgtctgcccgttcatcgcaaaaatgtgctcagcccgctcatagtcgtagctgaccatccagaccggaagcagtacgtaaaagctgctgattttatcggtctgaatctgctcatccgtaatatcagccgtcgtatatccggagaaggtggatctgatataagaatcaatataatggctgattttatccttcgcccgcggaaagagatcgtcatcggtataattgtacttttccgcaatatatcccgctaaataggccgtattaaactccttcagctcactgtatgagtaaggctccaatttgtccattaattcatcattcattttttctgaagcgtcgaccggaattttgagataatcaagattgatatcgcggtacgcgttgtaatactcggtctccgtcacccggtattctccatcttcatagtgatgcactctcgtacaaacggcattgacctgaaccttgctgtttaagtcaaacatccaaaacggcacgtacatgccggttatgctcttcacccgatcggcagtcataaaccctttcggtgtcagacggccgtttcggcaccactttttaaaagcgctcatggcttcttccttgctgatcgtaaaagggatcaccatcgaaggcgcgagatttcccgataatcggtcggcgagaacggcggctcctccgcaaaacccgcacgtcgtggccgtcgtttccgcctcagtcattaataccgcgccgcaattttcacagcggtactcgttcgcctcattttcggaaaatctcgtcgttatatactcctttggcaggctttcaatctgatcctgccgcccgcagctgtgacatgtcagcatgccggatgaactgtcaaagaccatatcatcgccgcagttcgggcatttataagaaatgatcattctgtttctctcactttctctttatatcggacaaagctgcagcccgctgtctattgatctttactgaaaagcattttctgcttgagcgccgccaattcatcatcgacactgctttgattgctgtcatatttagccgtcagctcgtcaatatcgtctttcggagacgcgttcagctcagccatcgcattggcatgatcaagcgcttggttgaccttgtcttccattctgccgaaagctgtcatcgattggcccgcatttgacacagaggaccccaatttgttcattctctcctgcgtttttgccacagaccacttcgctttgatggcatttcggcgcgactcaagctctccgatatcagcgacaagcttgtcatgcattttgcgcatttgagacgcgttggaagaagcgagctgataagccgtctgcagctcggtcagtcttgattcaacagccgctttcctttccaaaaatgtccgcgcatcggcttcattgccggcctgcaatgctttcatcgcataattttccatcttttcggcatcagcctggcattctgttaacgctcttttcgcccgctgttcctcagccatgacagaagccgtctccgctttcacttttcctaaatcactgttcagattccgcaaatattgatcaaccattttttcagggttttcagctttatccagcagcgcattgatattgcttgacatgatgtctttaaatcttcctaaaatactcatttttcattttcctcccaaaattaaatagtaacaagttcatagttatctatactgtttttttcgaaaaaagtttcattttctcataaatttatgtattttatatgaaaatagtctcatccagcccatttgtgccggcggaaattctttatgaccagatacagtgagaacaaaaaataaacaaacagcccgatcatcaacccgctcattaacggataatgtttcgcagcatacacaaagaaatcaagctgcgaaatctgttcaggacttgtaatcgtatccgtcccattcaaaagctttgaaaatttcgccgtatcattccaatcaaacgaatcagaaacaagctcactcccctgataccaattcacagcggcgagacagagaaaacaaaaaacagaaaacgcgcattgcacaataagaaaaacatgtttcatgaaaaacattcctccgcggttcaatatcatgggccgtcacactatacatgacggcagcagcagaaacttggttttactcagaactgataaaaacgtgattgtatgtacttcacatcggttcaatttactggatgcttttctaaagtataccgtatatcgaaaagggtttcagacctaaataaagaggatgcttcccgaagtccgatgactttcaagaagcatcctcgatattttacagagtcactccaacctcttttaagctcggcaaagcatcaatcgcaccgattttggtgcacacgagcgcccctaccttattggcaaatgagacaatatcacgcagcttcgcaaaatcttcggctgccgtctgaatctcatccgtgcgcgccagctgatacagcgccgcgccgacaaacgcatctcccgctcccgttgagtctattgatgtcaccggaatgctcggaatgatgtcaatatccttcccatttgaaagaagggtaccgcttttcccgagtgtcaccgcaacaatgccggccccgagctcatgaagaaccgcaacaccttctttatgatccttcgcaccgctgatgatctcaagctcttcgtcactgactttcacaaaatcacttacggcaacggctttttttgcggtgtttataaactctgaaactcttcctttccataaatcctcacggtagttaggatcgaaggaaataaactgtccattgtctttcgcaatcgacatcagccgtaaataggctgagcaaaacggatcagataacaatgccgtcgctgacccgaaatgaaggattttggcatcgtttaccttttccagatcaatatcatccagcgtgaacaaagcgtccgctcctctgttaaacacaaagtcgcgctccccattttgttttaatgaaacaaacgcaagcgttgtaggcgctttctcatccatgacgagcatagaggtatcgacatgtgcggcgtccaatgtctgcttcagaaaatacccgaacggatctttgcctgtttttccgctgaaagccgcgtctccgcccagcttagcaatggctgccgacacattcgccggtgcgccgccggcactttttaagaaattacgcccttccgtcaaatcaacatccacatcggtacaaaagaaatcaattaacaattctccaatacaaataacagattggcttcccacattatcacactcatttatcaattctcgattatagtttcagtatagtgctttctgtcataaatacaaccgtttacatagaatattttaaattttacgtatacttatctggcagccctttgttccagatcagacatcatctgctgatattttttttcagttaaaggataaaaagaaataagaataatagacagcagaatgaacaatcccgggatgagcgcattcatatttttaatcgcattcaatgacgaggccgtctgatcggtattcgcggcatatccggcgattccgagataaacggccgaaaatgacccggctaacgcaactccgagcttattgatgaaactcatgctcgaaatcaccacgccatcagcccggactccggttttccattccgcataatcgacacaatcggcaaccattccccaagcaagcgtatttaaaggcgtcgtaaaaaatcccgaaacgaaaagccaaaagaaaataagcggcagcgaagaatacgatgtaaactgaaggcccgcataagaaatcagcgatagcgccgccgtgatgatcataacctgcttccggccccgcttctcagaaaagaatggaataaacagattgctgatcagcgccgctccgaaaaataatacagttcctaaaaacacaaattccttatggctgacgttatacgtaaaatagtacaccatcgtgctgagcttaatgttaaacccaatcgcaaacgccaaaaatgcagaaaccaaaatgagcaaaggcttgtttcggaataaaacggacaacgtttttttcattccttgtttttttcttttttcaggctgaatccgttcccgcacagtaaagaaactgaacagattcaatgcgatgctcaccgccgcatagataagcgccgtcatctggaatccaaacgcctgatctttcccgccgatggcgtccgcaagcggtgtcgcacaggaaatcgataacagaattccgatataaaccaaaatcatccgggtcgtcgtcagaaccgtccgttcctccacggaattcgtcatccgccccgttaagctgttgaccggaatcgtctgcatgctgaaggacatcccaagcagaatataagtgatgtacgcataaaccatattccccgtctcgccgaaatgaggggtcgtgaagcataagaacgtaaatagcgcaaaaggaaacgccacccacaaaagatacggccttgcctttccccatcttgtattcgtcttgtctaaaatcacgcccataatcgggtcaaaaacagcgtccagcacccttacgataagaaacaaagctgcgatgaccgcaggcttaatgccgccgacgtctgtatagtagaataataagtatgcgtttacaaactgaaagataatattgtacgacatatcgccgaatccgtagccgatccgttccatccaggacaggccgcgatatttcgtctttactgccgctgctttttctgtttcaatcattatttcccaccccaagaatccgttttcatttttgataagcaagagggagaatgcaaagatcctccccgttcactcagcgatttggatacaccatcacttttaagcattcatttttgtattgaaaggcccgttccatcgcctcttgcgtcttctccagcggatattggtccgttacaagatgcttcgtgtccactatgccggaagcgagaaattcaattcccttcggatacgtattcgcataacggaagattccgtatatatcaatctcgttatctgcaataaacggcacattgagcggaatctcgttctgagaaggcaaaccgacaattgccagttttccgccccggcgcacggaagccagtgcggattgcaatgccgccggattccccgctgtttcccaggcagcatcaacgcctctgccattcgtgatcgttttgatttcttcaccggcatcctgttcccggacattgatgacatgcgtcgcgcccatttttttcgcggcatctaaccgcagctgctccaagtcggtcacaatgattgtgcctgccccgtatgctttcgctgccgcaacggccatcagccccacagggcccattcccatgatcgcaaccgttgaaccgggctgaagcttcgttctcgaggccgcatgaatgccgacagaaaacggttcaatcaaagccgcatcttcataggatagtgaatccggaatcgagaaaacaaagtcctggcgcattttgatatattggacaaacgcgccgtcaaccggcggtgtcgccaaaaactgtacatccgggcaaaggttataacgcccctccttgcacgcctcacagcgtccgcatgtgacaccgggttcgacggcgacacggtctcccaccttgaattgatcgacagacgatccgacggcggcaatttctcccgcgcattcatgaccgaggataaatggtttttccactacataattgcctattctgccatttgtatagtaatgcagatcagatccgcaaattccgacagccatcaccttaattaacacttcatcatgattgatgtcaggcacgggcaatgtttcgattttgatttctctcgtgttgtgcataaccgccgctttcatgttttgaggcactgtgtgagtcatttggcaaaatcctttctctgctttgaaatgtaagtgcatacatttttattttctctattactgcccctattttatctgcttttccatacgtacaacagcctttcctgctgtataaaaggacagccgcactgtactttttattttttcatatacaaaaaacactgaattgataaaatagtactaataggaggtgcaggctaatggctgaacttgaaaaccgggcacaatttgcagaactgctggcacctgccgtcaaatcgctgaaacatcatcctgatttcaaaattaaaaggacaaagaacgtaaaatccggacagtcttatatagatcaaatcgcactccgaataggcgtttcctctaacacgatcaaaagctggatcggacagatgggcgcaaactacattcccggacgaattgacgacggaaagttgttcggcatggtctggatcattatagaaaagactgatatggatcctgaatggctgaccggccttctggaaaccaccaccattcccgtcatcaaacccgcattgcccgtttggacggcgtcttgtctaaaaaaagcaaaaatactccggaaagacggatcattcggagcgccgagtgatgacgatgttgaaaaagcagtaaagcggctgtttcatgacagaccaagccacgaaacgaatgcgcttacaagaaactccgtcacgcataacttaccgtcacgccggacgggaaactttatcggccgcggctttgatatagaggcgattcgacaatggatgctgtctccgtcaccggtctgtttaatcacaggctgggccggcatggggaaaacaacgatcgctcttgaagcagcctacctttgtgccggcagttcaccagactggccggcattcaacagcatcatctggatcagcgctgactggaaaggattgagcttcagcgattttttaaacacgatcgcctatcagctcggacgcaccgaacaaatcgataaatcaatcaacgaaaaacggttcgtcgtccgcaatgcattagccgctcattcaaatgaaaaaccggtattgctgatcgttgacagcatcgatacagcggaacgtgacattcacgaatttatcatcggccttccgcaaggcgtaaaggtcctccttacggcacgggaaaacgtaaaacagacataccgggacggcctcggggaactggcggccatccagctgagcggccttgaagaaacggatgcccttgaatttttccatcaagaagtgcaccgctgtctgcaaacatgcaacctcccgcaaaaacgggaaaagctggagcagctgctgcggctatcgcctgaccttaagaatgaattcatctcggcagccgccggcaacccgaaggccatggcactgagcattgcatacatgtcagacgacgacatccccgctccgcagctcattcaagagcttaaacaagcgggttactcattattgaaattgtttgaggttctctttggccgcacatgggacagatgtcatgaagacacacgaaaactatggcagacgctttgctttttcgctaagccccctgatgaaaaaagcttggctcaagcggccggattagacgtccggcggtttcattacgcgattgagcaaatgcggtcatatgctttaatacagccggaacgaagcgcaggaagtattcaatatgcagcccatcaaaccgttgtcgcttacggagaacagcacttatccgaaaatcacgaattagcaaaagaagcccgcagccgctgggcgcattattatattgattatgcggaaacccatataaagcgggaacagcccaattctgtctattggagctacttgctgggacggaatttagagcaaatgaaaaaggaatggccgaacatcctaaaggtcatcgaatggtcggtcgaaaccggacaacatgacatcctgatcaaactcatcatccgcatcagccattttctaagcagaatcaacctgcccctgcgaatcgaatacggattaaaagccgccgatgccgcccgtcaatcaggcgaacacacgcgggaagcttactttcggatcgacacggcaggctgggcgctgatggaagtcaacgattcagacggagctctcaggcaaatagaagccggcctgaagatactcgaacaatcaggcgcaccggatcacgacgacttgaaagtatggggaaccgccctgcaatcgaggctgctgttaaaaatcggagaaccggacaaagcggcagcaatgctggacggcatcaaagatcagcccgtctcgcccattatccggcacagggttcttctggtccgcggcgacctgagtttcgcccgctctcactacgaagaagccatcacattatacgaagcggcaaacaaaaccagcgccgcatacggcggcgaaaaaacgatagaagcctatttcaacctcggcatggcttacgagaagtgtgatcagctcgaaaaagcggaaaaagcctttgaacaaatgctctatgacaaacacaacgccaatcaagttgagttgatctattactattacggaatggcacagctcttgtatcgtaaaggagaaaataagaaagcgatggaatcgaatcagaaggcgatgcgtttgattgattcgtgggagcctgcgattggaattcggggtgaggtggagcagtttaatatagtggaaaaagaaatttccaaatcaattattaatgtttagtcaaacttagagtaaactcaccctctcttttataaacccaaaaggcctaatcaatttataaaactgattaggcttttttgatagaattctatagggatttctgaaaaaatcaacttttagaccactgtaaaacaagggatttgcggtttcattctgctccttaataattcactttctataaaaatattaagaactattttaatagtttacaaattttatgataaaataatccatagactgattggagatgataaaaacatgggcattgaactactaccacaatcaattagggaaaaatatgaggtttacgaatggagacatgcttgtgcaatccttaaaaacgacttcccaaacgaatggaatgacattataaatgtcctagaaagcttcagattaaataaaagcgatatagttaaagcaggaggtagaaagtcccccatttcaaataaaattgataattttttatatagtttagactgggtagaaaagtcttttgataccaaagtattaatagatgaacaaaaacatacaacaccaacacataaaattgattgtttgaaaaaccgtattgcattggaaattgaatggaataataaagatcctttttttgatagggacttaaataatttccgtttgttatttgaattacgtgctataagtgttggcattattattacacgttgtactgaactacaagcattgtttaacttattaggtaaagggaaatcctatggttcttctaccactcatataagtaaactactacctagaattgaaggtggcggtggcggaggttgtcctattcttgtatttggtatatctgaaaagttatatgtagaagattattgactttaggggatttagcatgacaaaacatagtgaaacatggattcaaagaaaatatcacattgattctaataggaatggtctactaattcttaaaaatcaatatccccatttatggcatgatattgtttttgctttgagaggatttagattattgcacagtgagattgtacatccaggtggaggaaaatccttaattacacaaaggttagagaagttctttaaaaagaaatcttggcaagctattgaaacaaaagaatcaaacactgtaagtatagggagatttttcgggaagccaaatgaacgtgtatttaatacgattaacttaaattcacaaacccatgaaattgacttatttaaagataaggtagcaattgagatcgagtggaataacaaacatcagtttttctcgcgtgacttagaagcgttcgactatctatataaagcaggcattattgatgttggtgtaattatcacaaaacatacaagcctgcatacattttttgagtcattaggttatttaatttccactaaaaaacgtatagctgaaaaatatgcaagtactcatacacatacggagaagctttataatttaattaggacaaaccgatgcagctgccctttggtaattgtcggaataactaataaggtatataaactaaaatagagagggatttgtccctctccttaattatttcttttaacaagtaacaggcattcttgcacttccctgcttttgtcttctttacgccccattgtactatgcaagtaatctaaggaacgtgcttgaattgtatagttatcatcaaaagtgcttaccgctaattcaattatttcatcaagtttaatcattccagtattgctgtaacttaatacaaggtttgattccctttcgtttattattgcgaacatgcgttcaaatgcacttctaacttgcgaacgaatacaaaatggtgattgatgtctatcagttctatatcttcctttatacttaacttcagggtaatcatatcgtacaagggtttctattgcgtgataaaatcgtgaatagtgtacaaaacaatacggagggtcagcataaacggttgatttaaattcaatattatttaagcaatcgatataatcttttgagacaacgttactaggttgttgattttcctgtaaaacgttctggaattcagtaaattttctaatgaagtaagggactatttcttttctacggtatataagaatatcgttcatattcttattatttgtagcatctctatattgagcatagtgtcccgtgctttgtgagttgtaggacatagcaaacatcagactagaaataatcgggtaatacaagtcggaatccttatattcttccgcaacccctctaattgaatcaatccataaacattgttcaaaattccaatatgttcccgaataatactttaagaacaaatgatattcaatatctgaaaagtctctttcgattaattcttgttgtttcttctctaactcattgaattggctcagggtaaaatcaacattgtaatcaaatgagatatcaggatagcgttcattaaagtaattaaccttaattgtagctttttctattatctcttccaatatgttcggatcatcgtcccaatgataattccctagataggtcttagccaaaacagaagaatattcttgaatgtcatttgctacaaaaggcgtttgccctcgtaatgctcccgccaaaacactagaaccagcgaataggtctacaactgtccctccagtatagcattcgttaataccctcaattacataatcaattatctttcttttagatcccatgtacttaatgatatgtggaatattctcatttaaagttaaagtcattaaatctctctcattttcccttatgatttcctcatggactgggttagtcattttgcttcttcctttcattaagtaattatatcatttaggcacttatacaaaaagacttttacttaacgcgtaatacgaacacatgtttctaaatgcaatatataccttttctcggttgttagcaacaaaaaatccttagatactatattttttcacttaaaacctatcctaattccttgtatctcaagttatttcaataccagccttaacctgatgttttcatttcaaaatttttgatacaaagtcttaagaagcacaaaaagactacctccttttatttaggaagtagtcttctttgtactaattatttatacttagaacagtaacacaatgtaaggatataaaaccttacatcattccgcccattccgcccatgccgcccatgtcaggcattcctgcgccgccggcgttttcttccggtttgtcagcgacaaccgcttcagttgttaagagcattgctgctacagaagctgcgttttgcagagcagaacgtgtcacttttgtcgggtcaacgatacctttttcgatcatgtttacccattcgccggttgcagcgttgaagcctacgccgattttttcgtttttcaggcgctcaacgatgacagatccttcaagacctgcattgtgcgcgatttgacggatcggctcttcaagtgcgcgaagcacgatgttgatacctgtttgcgcatcgccttcagcttccactgcagcgactttgttgtatacgttgacaagcgctgtaccaccgccggatacgatgccttcttcaacagctgcgcgagttgagttgagtgcgtcttcgatgcgaagtttacgctctttcagctcagtttcagtcgcagcgccgactttgatgacagctacgccgccggcaagtttcgcaagacgctcttgtaatttttctctgtcgaattcagaagttgtttcttccacttgagcgcggatttggttgacgcgtgcagcgattttttcagtgtcgccggcgccttctacgattgttgtgttttctttcgttaccacaactttagaagcgcgtcccaattgtccgatttcagtagatttcaggtcaaggcctaagtcttctgtgattacttctccgcctgtaagaacagagatgtcttcaagcattgctttacggcggtcaccgaagccaggagctttaacggcaacagcgttgaatgtgccgcgaagtttgttgacaacgagtgtagcaagagcttcaccttcaacatcttcagcgatcagaagcaatggtttgccttgctgtacaacttgctcaagcacaggaaggatttcttgaatgtttgtgatttttttgtctgtgattaagatgtaaggattgtcaagaaccgcttccatcttatcagagtcagtcaccatgtaaggtgacgcatatccgcggtcgaattgcataccttcaacaacttcaagctcagttgtgaatcctttagactcttcgattgtgataacgccgtcgtttcctacgcgctccattgcttcagcgataaggcttccgacttcctcatcagcagcagagatcgcagcaacctgagcgatagactctttgccttcgatcggcttagaaatttcttttaagttttcgattgctacagtcacggcttgttccatacctttacgcacaccgacagggttagcccccgcagttacgtttttaaggccttcgcggatcatagcctgcgcaagtacagtcgcagtcgtcgtaccgtcaccggcaacgtcgtttgttttgctggctacttcagctacaagcttcgcacccatgttttcaaacgcatcttcaagttcaatttcttttgcgattgtcacaccgtcatttgtaattaacggagaaccgaattttttctccagaaccacgttgcgtccttttggccctaaagttacttttacagcgtcagcaagcgcatcgacaccgcgaagcatagcgcggcgtgcttcttcactaaacttaatatcttttgccatgttaacgaaacctcctcgaatttttaaaaatatttatttgcttagccgattacagctaaaatgtcgctttcacgtaagattaagtattcagtaccttcgtatttcacttcagtaccggcgtattttgagaagataatgcggtcgccctcttttacttctaaagcaacgcgctctccgctttccaacacgcgacctgaaccggctgccacgattttgccttcttgcggcttttcttttgcagaatccggtaatacgattccgctggcagttttttcttcagattctacgagttcaatgacaacgcgatcacctaatggctttaacaatgtaataacctcctcaatagtatgaatatgtaattttagcactcagctctaaagagtgctaacacagttattataataaagaatctcacttccaatttcaagtcataagaataaaaaattttcacgcttacatgattctctctcacactgattttctccttttttcacgtcaagttcacttgtgttacaataagaacaaataagttgattttataggataaaggagtacatatcatttgagaaaacagtattggtatatcattttgacatatgttatcatgcagctttccgcattgatcggcattcctttaatgtacaaattcggctatgcgggcggacaccctacgaatgcgaacctcaccatggctcaggggatttattccgtcgtaagcttttttatctgcctgattatcgttctcttgattttgagaaccgcgccgaagcagacattaagaaacgggaagaaagcatccgccggcatgtccgttctctgggcggtcgcgggaatatggctcgctttattttctcagggaatcgccgggatgattgagcagtatgtctttcatgtgggcagcggttccgaaaacacgaaagccattctcagcattattaaagccatgccgctcatgattatcgtttcttctatcgtcgggccgattcttgaagaaatcattttccggaagatcattttcggtgtattatatgaaaaaacgaatttctttatcgccggactagtcagttccgtcattttcggcattgtgcatcaagacctcacgcacctgctgctgtatacggccatgggctttacctttgcgttcttgtatgtgcagacgaaacggattattgtgccgatattcgcccatgtcatgatgaataccattgtcgtggtcatgcagctcggccccgcccaaaaatatattgaacagcatagtgagcaaatgcaattaattattggaggattgtttgtatgaggaacccaatgacttggggcttgatttatttcgcagtcggctgtatctttacgtatttggccgcaagctctccgggaagcatgtggtctttttattccatactgctgatggttttcgccgcttataatatcagcatctcgtttaaaatgttcgctttctcatttaaagtgaaaaaaaatcaaaaataaaagaaaagccatttctcatcattgagaaatggctttttttatgctgatacgtcctgatcggattcgctgctgccgttctgccttttccgatacgccgcttttgagataagaatgctgatctcatataaaatgcaaagcggaatggtaatcatcaagtgagacagcagctcaggcggcgcaatcatcgcggcgatcacaagcagcacaaaatacgcgtacttcctgatcttcgataaaaacatcggcgtgataacaccgagtctcgttaaaaacatgatcagcaccggcatctgaaacagcagcccaaacggaatcgtcagctgcagcagaaaatgaaagtactcggtgatcccgatcacctggttgacatccaggtcattcgaaacccgcttcataaaatcaacgaccagcggaaataaaatataataagaaaacgacacaccgccgacaaacagcacgatcgaaatcggaatatagctgagtgttactttgcgctccttctcatacagacccgggctgacaaacgcccaaatctgatagagaataatcggcgaagtcaaaatgatgccgatgataaacgcgaactgcaaaaagataaacagcggatccgtcaggttaaaagcattaagggtgagctcttttacttcatcggctttttgaagatacacaatgataggttttgccagaaaaaagccggcaataaagaaaaccgtaaaggataacgccacaatcagcaatcgtttccgaagttcggcaatatgctccacaagcgtcatttgattcactctcatacgcgtcatcctatcttactgttcttctttctttttttcctcttcttcaccggctaatcccttagtagcgttcttaaattcacgaagcgtgtcccccgccgcttttcctaattcgggaagcttcttcggaccgaaaataatcaccgctaccacaccgataaccgccaggcttccaggaccgatcatgtgcagctcctcctttcgctattcaatttcttccaaaacagaataatgcttcaagaaataaaccaatgattgaagctctacagctaaatctatatgatgaattcgaatgtgatccggcacattcaaacgggccggcgtaaagttaaggattcccttgattccgagcgacacgagccggtcggtgattgactgggcggcaaccgcaggaacggtaagaatcgccacgggttcatccttaatgtgaagctctaaatcattaagatcaaagacaggcacaccgcctacctcagttcctattttactctgattcacatcaaaagccatagatatttttgtgttattattttttgtgaaattatagtgaagaaacgccgtccctaaattcccgacaccgatcaaaatgacgttcgtcgtttcatcctgatccagtgtttttctgaaaaatgacagcaggtaatccacattatagccgtatccttttttgccgagcgccccgaaataggaaaaatcccggcggatcgtggccgaatcgacttttaccgcgtcgctcagttcagcggatgaaacgcgctgttttcctgacgcgtgtaaattctttaaaaagcgataataaagcggcagccgttttgccgtcgcctgtggaatttttgattgatccttgttcatgattggtcctccactttatactcagatgcatctcttttaaaatcaccgtttttgcctcctgtcttttccatgaggcaggtcgggccgatgaccattcctttatccagcgccttgcacatgtcataaacggtcaaagcgcagactgaagcggaagttagcgcttccatttccacacctgtactccctttcgtttttacgcttgcctgtatatgaagaacggcttcggaatccttttcctcccagccgaatgaaatgtcgacgctgcttaaagaaagcgggtggcacatcgggataatcgctgacgtctgctttgcggccataattcctgccacctgtgcgacagccagcacgtctccttttccgatctcgcggtttttgattctgctgtacacgtcatgcttcatctgtacgctggatatcgcagcggcagtacggactgttgaagatttatcgcttatatccaccatgcgggcacggccttcttcattaaaatgagaaaatccattcatatttaaactctccttacttctgatcatacactattttctccctgatgtcttatcctataatgttccaattctgatgtattgtttgctgacagcaggttgataagctacacttaacttattataacagaggtgaaataatatgatgatcttacaaattaatcagctatccaaatcttttggcgctgatcctattttaaacaatataaagcttgaagtcagatctcgggatcgcatcgccatagtaggcagaaacggagccggcaaatcaactctccttaaaattatcgcaggtcacctttcatatgaaaagggtgaattaatcaaaccgaaagaattaacgatgggatatctcgcccagcacacaggcttggaatcccagcttaccataaaagaagaactgctgagtgtttttgatttcctgaaagcaatggaaaaagaaatgcgctctattgaagaaaagatggccacggccgcccccgcggagcttgagacgctgatgaaaacctatgacaggcttcagcaggatttcaaggataaaggcggctatcaatatgaagcggacgtccgatctatccttcacggactcggcttcggaaaatttgacgattccgtgaaagtgcaaagcctgagcggcggtcagaaaacaaggcttgcgctcggaaaactgctgctgacccagcctgatctgcttattctggatgaaccgacgaaccatctcgacatcgatacgcttacatggcttgagcattatttacagggatattcaggcgcaatcctgatcgtttcccacgacagatactttcttgataaagtcgtcagccaagtgtacgaggtctcacggacagaaagcaaaaaatacctcggcaactacagcgcctatttagagcaaaaagccgagcagtatgagaaagacctgaagctgtacgaaaaacagcaggacgaaatcgccaagcttcaagattttgtcgaccgcaatctggccagagcttctacaacgaaaagagcccaaagcagacgaaaacagcttgaacggatggacgtcatggcaaagccgctcggggatgaaaaatcagccgccttccgttttgacattacaaaacagagcggaaacgacgtcctgcgcgtacaggatgtttccatcagctatgacggccagcctccgctcttgaaaaacctgaccttcggcattacaagaggtgaaagcgccgccctcgtcggaccgaacggaatcggcaaatcaaccttgctgaaaaccattatgaatacaatcagtccggaatccggatcgatcacgtacggttccaatgtcacaatcggctattacgatcaggagcaggctgaactgacctcgtccaaacgcgtgctggacgagctgtgggatgaatatccggacatgccggaaaaagagatcaggacatgcctcggcaacttcctgttcagcggagacgatgtcctgaaaccggtccgctcgttaagcggcggggagaaagcaagagtcgcgcttgccaagctgatgcttcaaaaagcaaactttctcatccttgatgaaccgacaaaccaccttgacctggacagtaaagaggtgctggaaaacgccctgatcgactacccgggaacactgttatttgtatcgcatgaccgctactttattaacaggatcgccacaagggtgctggagctgtctccggatcatgcagaagaatatttgggtgactatgactattacaccgagaaaaaagcccagcagctggaactggaagaaatgaagcggcaggaaaaggagcaggctcagcctgccggcaaggttaaacaggatacgaaaagaacttacgaggaagaaaaagaatggaagaagaaagaacggcagcgcctgagacgcattgaagaaattgaagcagccgtctcatccgccgaagagaaaatcagcgccaatgaggagctgctgtgcgatcctgacgtgtatcaggatcatgaaaaggtacagaccattcacgcggagaatgaagctctgaatcaagagctcgaaaacttattagcagaatgggaggaactctcctcagaagaatagaaaaagtcaagcacctctttaaggggtgcttttttatccacagctatcctccttgtcagccatgtaagtaagcgtgttatacacactatccacaaaattttctgactttatccactttactaacaacttatagcctcttatccagcctggatttctggatatattcacaatcctgtggatatgttagaattatctgttaataagtaaaaaaaagcctcacgttttacaacgtgagacgatcaaaggatgttaattccaagccgggctgtccgttcatatcatatgagccccgaatccccttttcaaaagcaacggttccggcagccgcaatcatcgctgcattgtccgtgcataaagaaagcggcgggatgataagctcgggatctcccgaatgactgaattcctgctgcagtgcggctctcagccctttgttagcggctacgccccctgccagcagcacttgtttaaccccatattctttcgcggccttagaggtttttgccgtcagtacatcaatgacactctgctgaaagcttgcggcaagatcctccggaggaatcacctcatttttttgcgaggcgttatgaagtgtgttaatcacggctgacttcaggccgctgaagctgaaattgtaagacccttcttccagccacgcacgcggaagcggaatggaatccgttcccacagcagccagcttatcaatctgcggccctcccggataaggaagccccatcgttcttgccactttgtcgtaagcttcgcctgcggcatcatccagcgtttcaccgataacctcgaatgaaccgtgctctttcatataaaccaattccgtatgtccgcctgacacaaccaaagcaagcgccgggaattgaagctctcctatcagcctgtttgcataaatatgacccgcaatgtgatggacaccgactagcggtatttgatgggcaaagcttaacgcctttgccgcattgactccgattaacagggctccgacaagtccgggtccttccgttacggcaatcgcatcaagatcatcaaagcccatctccgcttttgaaagagcttcctcaatcacaagggtaatctgctccacatgatgtctggacgctatttcaggcacgaccccgccgaaacgtttatggctttcaatttgagaagcgacaacgtttgaaataatttcattcccgttttttacgactgaggccgctgtttcatcacagcttgtttcgattcctagtacataaatatcttgtttttcactcatgtaatgtcacccacattaataacgcatcttccccgttatctgtatagtattgttttctgattccaccggcctgaagaccgaattttttatataaggattgggcgggatgatttgagaccctgacttcgagagagagccttcttgcctttttttctctgcacaattctatcgcagagcgaaacagcgcttctcccaatgattggccccgatattccggcttaatggctatgttcgtaatctgcgcgtcatctataataatccagattccgcaataccccgccagacagccgtccttttcaatgacaaggtagtgggcatacggattttccaaaagctcatgataaaatgaatccttcgtccacggagaagtaaaggatgctgtttcaatttcataaatttgatcaatatcttccggacgcatgcttcgaatcgccgttttcgttttcatccctatcaccctatttttgagattccatccatttcgcttcagcctctgccagacgcaaataatccggaacaaggctgtggacatccgcttcctctttttccaagcctaaaaacgccagctctgacggccgcggattatgctgtgcagccgttccaatcactgcttgagatgtcagctcatgcagaatggtttcttcatgaatggctgtatcgtgccctaaaaataaaaccggagacgctttttctttcagcatgccgagccaatcagtcaaaaggacattctgatcaggaagaacggattgtaatcggccgtcctgatatccataaagccccgtatatacctgtccgcgccgggcatcaaataacgggcagatcagtccttgaaagtgccgtccgttagccgccagcacctccagactcgagacagcggaaaccggaagcttcagcgaccatgccaatgtttttgccagcgtcacaccgattctgacacctgtgtacgatcccggtcctttcgccaccgctattttcgtaaggtcctgcggtgttaggccgcaatccttcagcaatgaattgacagcaggcatggcccgcacggaatgattcttttttaaatatgtaatatactccgccatcaccgttttgtcacgaacgagcgcggcacccagtgtgtaatttgacgtatcaattgccagtattgtcatgtttatttatctcctcacaaagcgtttcataccgtgttccgcaagccgtaaaggtaatgtcccttgcctcatcaccggctcttgtgatgacgatctgcagccgttcagcaggcagctgatcctgaattaaatgagcccattcaattaaacagacgccttgtccctcaaaatattcttcaagccctaagtcttcgctttcatcctccatacgatacacatccatatgatatagaggaagcgaaccgtcatggtattcttttataattgtaaaagtcgggctgtttaccactttcgtgattcccagtccttcggcaaaaccctttgtaaaagtcgtttttcccgcgcctaagtcgccttccagtgtcaaaatgtctcccggctttgccaaagaagcggcaagcttggctacggctttcgtttcttcggggtttttcgttctccattgtaatgtcttcaaagtgagtcacccgtcttatttaaaatgattgtatccttttttctcaaggacgatttgtctctgatcattggctgtcaaaagaacacatgcttccttccgttcagttaccgctcctatcttcgcaatcggaatgcccgattgagtgcagtaatcaagcaaagaaatccactcttgctgagaaaccgttccaaccaattcaaaatcttcaccgccgaataacacccatttcttccactcagaatctgcctcaggcaaatccggatgcaccggcagaagttgttcttcgatttctatcgtaactgaacttgccgcagctatttcatgcagctcactggccaatccgtcactgatatcattcagagccgcgcgctgaagctgagagcagaagcggccgacctgaactctcggaacgggccgtttatgttttcggataaaataatcactcgtatgaaaagcagaagggagtgtttctcccaataaaagagacagtcctgctgcggacgaaccgatatcccctgtaacaaacacaacatctccgggtcttgccgagcttcgcagacaagcgcaatccttctcaacttctccgatgacagtaacggtaattacggcttgaccggaagcggagacggtatctcccccgatcaaatccatttgatatagtttcgccagttccgccattccttcatacattgcctggacgtccgctttctgccagcaagaaggaaccgctagagacaccaaataaaacttcggaatgcctcccatcgccgccacgtcactaatgttaacagcaagcgccttataaccgatatcatgaggagaggaatactctaatttaaaatggacattctccaccattgtatcaaggcagacaatttgctgcatatggggtgatgctgtataaaccgcaccatcatcaccgatccctacatcgacggaaggatgataatgcgaatgcggcgtaatactgtgaatcaaatcaaactcatccatatatctcccgtctccctttctgacgctcttgtgaaatacagctctttctagtgtatcggattatgtttcaatatccaagactttaacgatataaaagaaagcttggttagataccaagctgccagcattaaaagaaaacacaaaaaaaacgaaaacatgatcgtttcgtttacaataaaaatggcggtccggacgggactcgaacccgcgacctcctgcgtgacaggcaggcattctaaccaactgaactaccggaccatttaatttttggttgcgggggcaggatttgaacctgcgaccttcgggttatgagcccgacgagctaccgaactgctccaccccgcgatgataaaattttagaaaagcttggcggcgtcctactctcacagggggaaacccccgactaccatcggcgctgaagagcttaacttccgtgttcggcatgggaacgggtgtgacctcttcgctatcgccaccaaaccattgagagtgttctctcaaaactagataacagtaagcatacattcaaattggttaagtcctcgatcgattagtatctgtcagctccatgtgtcgccacacttccacctcagacctatcaacctgatcatctttcagggatcttacttccttgcggaatgggaaatctcatcttgag

SEQ ID NO: 12 - DNA, 60175 bp, Bacillus methylotrophicus
ccgcaaggaagtaagatccctgaaagatgatcaggttgataggtctgaggtggaagtgtggcgacacatggagctgacagatactaatcgatcgaggacttaaccaatttgaatgtatgcttactgttatctagttttgagagaacactctcaatggtttggtggcgatagcgaagaggtcacacccgttcccatgccgaacacggaagttaagctcttcagcgccgatggtagtcgggggtttccccctgtgagagtaggacgccgccaagctatcattacggtaaaggcagctcattatgagctgccttttttgtgtttttctgcatacattatataatatgagaaacgtaacgatatgcctttttgcaaaagcaggttttatgcttgtgcaaagtggaaataatagagatagagcgatacagttgaaaaattttgcgaaacaccttatagtaaggttaaagtcaaatatagtcaaagtcaatgaaggagggggttgagtgggacataatatttctgacatcattgaacagtacttgaaacaagtattggatcaaaatggcaaagaaattttagagatcaaacgcagtgaaatcgctgataaatttcaatgtgttccttcccaaataaattatgtcatcaacaccagatttacaagtgaaagaggatatattgttgaaagtaaacggggaggcggcggttatattcgtattatcaaaattaaaatgaataacgaagtcgtcctcatcaataatattatttcgcagattcatacccacttgtcccaggcagcctctgatgacattattctcagactgttagaggacggagttatttcggaaagagaagctaaaatgatggtgagtgtaatggatcgttcagttctatatattgatttgcccgaacgggatgaactaagagccagaatgatgaaagcaatgctcacatctttaaaactaaagtaagcgggtgaaaagattgatttgtcaagaatgcaatgagaaaccggccacttttcactttacgaaagttgttaatggagaaaaacaagaagttcatatttgtgaacaatgtgcaaaagaaaatagcgattcatacagtataagtggaaaccaagggttctcgatccataatttattatcaggactgctgaatatggagtcttcatttcaaaacaccggttctcaaatgttcggctattcagagcaagggacagcttgtaagaaatgcggtatgacgtttcagcagctgagaaaaacagggcgtttcggctgtgcggaatgttacgatacgttctacagccaaattacgccgatcttgcgaaaagttcacagcgggaatacggtgcatgccgggaaaattccaaaacgaataggcggaaacctgcatgtaagacggcaaatggaaatgttaaaaaaagaacttgaatctttaatacaccacgaagagtttgaaagagcagcggaggtcagggatcagatccgatcgttagagcagaagttaaaaagtaaagacagtgagggggaacaagggtaatgtcgctcaagcattttattcaggacgcactaagcaattggatgaagcaaaagggacctgaaagtgacattgtactcagcagccgtatacggttggcccgaaactttgaaaatataaagtttcccgcccggtatacgaatgaagaagcctcatccatcattcagcaattcgaagatcacttttcaggaaaagaactgcctgatatcggtcaatttcatttaatcagaatgagtgaagctcagcctttggaaaaacgggtgctgatggagaaacatctgatcagcccgaatttaacggaatccccttttggcggctgtctgctttctgaaaatgaagaagtcagcattatgttaaatgaagaagatcatatcagaattcaatgcctcttccccggcttccagcttctcaatgccataaaagcggcaaaccaggttgatgactggattgaggagaaagtggattacgcctttggagagaagagagggtacttaacaagctgtcctacaaatgtagggacgggactaagggcttcagtcatgatgcatttgccgggccttgtattaactaggcaaatgaatcgaattataccggcaattaaccaattaggtttagttgttagaggaatttacggtgaaggcagcgaagcattaggaaatatctttcaaatttcaaatcaaatcacactcggaaaatcagaacaggacattgtagatgatttaaacagtgtggctgcccagctgattgagcaggaacgttcagcccgagaagcgctttaccaaacctcgaaaattgaattggaggaccgggtattcaggtcttacggtgttttatccaactgccgtatgattgaatcaaaggaaacggcgaaatgcctttctgacgttcggctggggatagacctggggatcattaaagggctatcaagcaatatacttaatgaactgatgattttgacacagccgggttttctccagcaatattcgggcggtgcattacggccgaacgaaagagacgcgagaagagcggctcttatcagggaaagactgcatttagaaatgagtgcaaatagacaggaggatgattcgatatgatgtttggaaggtttacagagcgagctcaaaaggtattggcactggcacaggaagaagcactgcgcttaggccataacaatattggaactgaacatatcttattaggtctggttcgtgaaggagaagggattgcggctaaagcactccaagcactcggactcggttcggataaaattcagaaagaagtggagagcttaatcggacggggacaggaaatgtctcaaacgattcattatacgccaagagcaaaaaaagtcattgagctcagcatggatgaagccagaaagctaggacattcttatgtgggaacagaacacatacttcttggactgattcgtgaaggagaaggcgtagcggcgagagttctgaataatctcggtgtcagcttgaataaggcgagacagcaagtgctgcagcttctgggaagcaatgagacgggatcttctgcatccggtacgaacagcaatgcaaacacgccgacgctggacagtctggcgcgtgatttaactgcgattgcgaaggaagacagtcttgatccggttatcggccgaagcaaagaaattcagcgtgttattgaggtattaagccgcagaacgaagaataaccccgttcttatcggagaaccgggtgtaggtaaaactgcgattgctgaaggcctcgcacagcagatcatcaataatgaagtgccggaaattttacgtgataaacgcgtaatgacattagacatgggtacggttgtagccggtacgaaataccgcggagaatttgaagaccgcttgaaaaaagtaatggatgaaatacgtcaggccggcaatattattttattcattgacgaactgcatacactgatcggagcggggggagcagaaggtgcgattgacgcgtcgaatatcttaaaaccttcactggcccgcggagagcttcaatgcatcggcgcgacaacgcttgatgaataccgtaaatatatcgaaaaagacgccgctctcgagcgccgtttccagccgattcaggtggatcagccctcagccgatgaaagcattcaaattttaaaaggactccgtgaccgctatgaagcgcatcaccgcgtatccattaccgatgaagcgattgaagcggcggtaaaattgtccgaccgttatatttctgaccgcttccttccggataaagcgatcgatttaattgatgaagccggttcaaaagtgcgtctccgttcgttcacaacgcctccgaacttaaaagagcttgagcagaaactcgatgaagttcgcaaggaaaaagacgctgccgttcagagccaggagtttgaaaaagcggcttcccttcgtgatacggagcagcgcctgagagaacaggtggaagacacgaaaaaaacgtggaaagaaaaacaaggccaggagaactccgaagtttctgtagaggatattgcgatggttgtatccagctggaccggggtgcctgtatctaaaattgcccaaacggaaacagataagcttctcaatatggaaagcattctgcactcccgcgtcatcggccaggatgaagctgttgtagccgttgcaaaggctgtcagacgtgcaagagccggtctgaaggacccgaaacgcccgattggttcattcatcttcctaggccctacaggcgttgggaagacagagctggcaagagcgctggcggaatccattttcggtgatgaggaagcgatgatcagagtggatatgtccgaatacatggagaaacactcaacttcacgtcttgtcggttctcctccgggatatgttggctatgatgaaggcggtcagctgacagaaaaagtgagaagaaaaccttattctgtcgtactgcttgatgaaattgaaaaagcgcatcctgatgtgtttaacatactcctgcaagtgcttgaagacggacgcttgactgattcaaaaggacgcactgtggatttccgcaacacgatcctgattatgacgtcaaacgtcggagcgagcgagctgaaacgcaacaaatatgtgggcttcaatgtgcaggatgaatcacaaaaccataaagacatgaaagacaaagtcatgggagagctgaagcgtgccttcagacctgagtttatcaaccggattgacgaaattatcgtcttccactcccttgagaaaaaacatcttacagacatcgtgtcgcttatgtctgatcagttaacaaaacgtctgaaagaacaagatctctctatcgagctgacggatgctgcaaaagtaaaagtggcagaagagggcgtcgatttggaatacggcgcacgtccgttaagaagagcgattcaaaagcatgtggaggatcggttatcagaagaactcctcagaggcaatattgataaaggccagcacattgttcttgatgttgaggacggcgaatttgtcgtaaaaacaactgctaaaacgaactaatatagtgacaaacatgaggcatacgtaagcaagtgtatgcctcactttgttatatagagaaatattcgataaggaagaggtcttacaacatatatggctaaatcaaaaacaaaattcatctgccactcatgcggttatgaatccgcaaaatggatgggaaagtgcccgggctgcggggcttggaatacaatggtggaagaaaccataaaaaaagcgccggcgaatcggcgggcggctttctcccactccgttcaaaccgtccagaaaccatcacccattacatcaattgaaacatcggaagaaccccgcgttcaaacaaagctcgaagaattcaacagagtgcttggcggcggcgttgtgaaaggctcgttagtattaatcggcggcgatcccgggatcggaaaatcaacgctccttctccaagtatccgcacaattagctgatacggccggcagcgtgctttacatttcaggggaagaatccgtgaagcaaacgaagctgcgcgccgacagacttggaatcaacagccaaatgttacatgttttatctgaaaccgatatggagtatatttcgtctgctatacaagagatgaaacccgcatttgttgtcgtagactccattcagaccgtttaccaaagtgatatcacctcagctcccggcagtgtatcacaagtaagagagtgtacggccgaattgatgaaaattgcgaaaacaaacggcatacctatttttatcgtcgggcacgtcacaaaagaaggatcgatcgcggggccgagattgcttgagcacatggtcgataccgttctatactttgaaggagagcggcaccatacattccgtattttgcgggccgtaaaaaaccgtttcggctccacaaatgaaatgggcatctttgaaatgcgggaagaggggcttacggaagtgctgaacccttctgaaattttcttggaagagcgttctgccggggcatcgggttcgagtatcgttgcgtcaatggaaggaacgagaccgattctggttgaaatccaggcgctcatttcaccgaccagttttggaaacccgcgccgcatggctacaggcattgaccacaacagggtatcgttaattatggctgtgcttgagaagcgggtgggtcttttgcttcaaaatcaagatgcgtatttaaaggtcgccggcggggtcaaactggatgaaccggcgattgatttggcagtagccgtcagcattgcctcaagcttcagagatacaccgccgaatcccgcagattgctttatcggtgaagtgggtctgacaggagaagtccgcagggtgtcaagaatcgaacagcgcgtaaaggaagcggcaaaactcggcttcaagcgcatgattatacctgaggcgaatgcagacggatggacaataccaaaagggattgaggttgtcggagtagcaaatgttgcagaagcgcttcgtacttcattaggaggatcataatagatggaaaaagagaaaaaaggggcgaaacaagagcttgacctgtctgcaattctgcagttcgttgcaccgggcaccccgctcagagccgggatagagaatgtacttcgggcaaatacaggcggcctgattgttgtcggatacaatgataaggtaaagcaagtcgtggatggcggttttcatattaatacatcatttgcgcccgctcacttatacgagctggccaaaatggacggtgccattattttaagtgattccggccagaaaattctttatgcgaatacgcagcttatgccggaagcgaccatttcttcttcagaaacgggaatgaggcaccgtacggcggaacgggtggcgaagcagaccggctgtctcgtcatcgccatttcagagcgcagaaatgtcattacgttatatcaggacagcatgaagtacacactaaaggacataggatttattttaacaaaggcaaatcaggccattcaaacgcttgagaagtataaaaccattttagacaaaacgattacggctttaaacgcattagagtttgaggagcttgtgacattcagtgacgtgctgtccgtcatgcatcgatatgaaatggtgctccgaataaaaaatgaaatcaatatgtatattaaagaactcggaacggaaggccacttaatccgtctgcaggtgattgaactgattacggacatggaagaagaggcggcacttttcatcaaagactatgtcaaagaaaaaatcaaagatccgttcgtgctgttaaaagagcttcaggatatgtccagctatgatctgcttgatgattccattctgtttaagctgcttggatatccggcttctaccaatcttgatgattatgtgctcccgagaggatacaggctgctgaacaaaattccgcgtctgccgatgccgattgttgaaaatgtggttgaggcgttcggatttttgccaagcataacggaagccactgtagaagagcttgatgatgttgagggtatcggcgaagtgcgcgccaaaaaaatcaaaaaaggcttaaaacgccttcaggaaaaacactatatagatagacagctttaagaatcgcttaaacctgtcggaatccgggtatattattgttagtttttgtttattctgaatttgtaggctctgacccagtctgctgaaaaaatgctacttaaaaggaggtggaggtatgttaaaacgaatagttcaggcgttcttcattattgtgggcggcgttgtcggtatctttttaatacctgaattgtttgtgctgtcaaatatacaggacatacctttaataacaaacgcatatacgtctgctgcaattggtgctattatcttttttctcatcagtatatggacgacagaatatgtgattaattgggtaaaatggattgaagattctttgctgagagctccggtgccggatctgttattcgggagtctcggattggtttttggacttatcattgcatatctcattgtaaacgtgattccgctggacaatattccgtaccgtatattcagcacgatcattccggtctttctggctttctttctcggttacctgggcttccaagtcggatttaagaaaaaggatgaactgatcagtcttttctccatttctgcaagaatgcagaagaaaaagggaagtgctgatgaggagcaggaggaacaggataaaaggctgaaaatcttggatacaagtgttattattgatgggagaattgcagatatttgtcagacgggctttttagaaggcgtcattgtcattcctcaatttgtgctggaggaattacagcatatcgctgattcttcagatgttttaaaacgtaacagaggacgccgcggactggatatcttgaatcgcattcaaaaggaactggatattacggttgaaatttatgaaggcgacttcgaggacattcaggaggttgacagcaagcttgtcaaacttgcgaagctgacatccggcgtcgttgtgacgaatgattttaatttaaataaagtatgcgagcttcagaaggttgcggtactgaatattaatgaccttgcaaacgcggtgaagccggttgtgcttccgggcgaagagatgaatgtgcaggtgattaaggacgggaaagagcataatcaaggtgtggcttacttggatgacgggacgatgattgttgtggaagaaggccgcaattatatagggaaacatattgatgtgctcgtaaccagcgtactgcagacagcggcgggacgaatgatttttgccaagcccaagctgcttgagaaagctctttaagagggagtttatatggaatatgttgtcgttattccggctgccggacaaggaaaacggatgaaggccgggaaaaataagctgttcatcagcttaaaaggtgcgcctgttattatacacacactgcgggtttttgaaagccacgcaccctgtcagaaaataatcctggtgataaacgagagtgaacgggaagattttcgccagctgctggcccaatttccgattcagacggaaattgagcttgttaccggaggtgcggagcgtcagcacagtgtatacgaaggactgaaagtgattgataaggactgggtcgtccttgttcatgacggagcgcgcccgtttgtcacacatcagcatatcgataagctcgtggaaacagcagaggaggcgggagcggctgtcctggctgttcctgtgaaagacacgataaaacgggcggaaggctcccgggttgcggagacctttgatcgttcaagcttgtgggccgttcaaacgccgcaggcttttcgtctttctttattgaagacggcgcatatggaagcggaaaacaaaggcttcttagggacggatgacgccagcctcgtcgagcgtcttgatggatatcaggtgagtatcgttgaaggcagctataccaatattaagctgacaacgccggatgacctgatatttgcggaagcaatcatgaaagcggaaagtgggaatcataatgtttagaatcggacaaggatttgatgtgcatcaattaacggaaggccgtcctctcatcatcggcggaattgaaattccttatgaaaaggggctgctcggacattcagatgctgatgtattgctgcatacagtcgcagacgcgtgtctcggtgcggcaggtgaaggagatatcggcaagcatttcccggatactgatccggaattcaaggatgcggattcttttaagctgcttcagcatgtctggaacattgtaaaagaaaaagggtacgtactcggaaatatagactgcacgattattgcgcaaaagccgaaaatggcgccgcatattgatgctatgagaaaacggatagcggaaggccttgaggcggacgtctctcaagtaaacgtaaaagcgacgacaacagaaaagctcgggtttaccggaagagccgaaggaattgccgctcaggcgaccgttctgatccaaaaagcctgatcattgttttgatgcccggtctatttggtggtagaatagatacatatattcggctagaggctacagacgagatgaaaggaagtatttgaacatgggaaatgaagtacgcgttcgttatgcaccgagtccgaccggacatttgcatatcggtaacgccagaacggcgctttttaactatttatttgcccgcagccaaggcggaaagtttattatccggattgaggatacggacaaaaagcgaaatattgaaggcggagagcaaagccagctcaactatttgaaatggctcggcatggactgggatgaaagtgtggatatcggcggagaatacggcccgtaccgccagtctgagcgtaacgacatttacaaagagtactatgaagagcttcttgaaaaagggcttgcttataaatgtttctgtacggaagaagaacttgagaaagaacgtgaagagcaaatcgcccgcggggaaatgccgcgctattccggcaaacacagaaacctgactcaggaagagcaggagcagtttttagccgaaggtcgacagccgagcatccgtttccgcgtgccggaagggaaaatcatcgcatttaacgatatcgtaaaaggtgagatctcttttgaatcagacggcatcggcgactttgtcatcgtcaaaaaagacggaacaccgacgtataactttgccgtcgcgattgacgattacttaatgaaaatgacgcacgtgctccgcggtgaggatcacatttcaaatacaccgaaacagatcatgattttccaggcattcggctgggatgttcctgtcttcggacatatgacgcttatcgtaaacgaaagccgcaaaaaattaagtaaacgtgatgaatcaattatccagtttattgagcagtatgatgagctgggttacctgcctgaagcgctgtttaactttatcggacttctcggctggtctcccgtcggtgaagaagagcttttcacaagagaacaattcattgaaatttttgatgtaaatcgtttgtctaagtcaccggctctgtttgatatgcataaactgaaatgggtcaacaaccaatacgtcaaagcgctggatcttgatcaagtggttaagctgaccctgccgcacctgcaaaaagcaggaaaagtcggcactgagctttctgccgaggagcaggaatgggttcgtaaattaatttctctttaccatgagcaattgagctacggcgctgaaattgtcgagctgactgatttgttctttaaagatgagatcgagtataatcaagaggcaaaagccgttctggaagaggaacaggtgcctgaagtgctcagcgtatttgctgcgaagcttgaagagcttgaagaatttacgcctgagctgatcaaagcctcaatcaaagctgttcagaaagaaacaggtcataaaggcaaaaagctgttcatgccgattcgcgtagcggttaccggtcagacacacggtcctgagcttccgcaggccattgagctgatcggcagagaaacagccgtcagacgcctgaaaagcatttaaatatacgattgttgacagggaagagtataaaacaatgaccattacagaaagaatcttcatcggctgagagagattcatgcgtcatgttttagaagtgcgcccttaagacctttgaagaacatttctgcggaaatcagtatttaaaggcggccgccgccgttaccggcttttaagttgggaaaacagtgacttgtttttcaaacagagtggaaccgcgcggtaaaagcgtctctgtcatgtttacatgcagaggcgctttttttataggcggaaaaacagactggagcggggagagaatggggggaagcatgtgttttttaaaatgctaaaagaagacatagatacagtgttcgatcaagatccggcagcaagaagctatttcgaagttgttttaacttattctggtttacatgctatatgggcgcatcggattgcacatgctttatataaacggagatttttcttcctggcgcgcctgatatcacagattgcccgtttctttaccggaattgaaatccatcccggcgcgaccatcgggagaaggtttttcattgaccacggtatgggggtcgtcataggggaaacatgtgaaatcggcaataacgtgacggtattccaaggtgtcactctcgggggaacgggaaaagaaaaggggaagcggcatccgaccataaaagatgatgctttaattgcaaccggagcgaaggtactcggctctattacggtcgggcagggttctaaagtaggggccggctccgttgtgcttcgtgatgttcccgacttttcaaccgttgtcggcataccggggaaagtcgtcattcagaacggaagaaaaatcaaacgcgatctcaatcaccaagacttgcccgatccggttgctgacaggttaagagcattggagcagcagatttttgaactgcaggctgaactggaagataaaaaagaaaggatcaaccaaaaatgaccattacactttataatacattgacacggaaaaaagaaacattcgttcctcttgaggaaggcaaagtaaaaatgtacgtgtgcggaccgactgtatacaactatattcatatcggcaacgcccgtccggcgattgtgtatgatacagtacgcaactatttagagtataaaggatacgatgttcaatacgtatcgaatttcaccgatgttgacgacaaactgattaaggcggccaacgagctcggcgaggacgtcccgaccgtttctgaacggttcattaaagcgtattttgaagatgtgggcgccctcggatgccggaaagcggatcttcacccccgggtcatggaaaacatgggtgccattattgaatttgtcagcgaactgattaaaaaaggctacgcttatgaatcagaaggcgacgtctatttcaaaacaagggccttcgaagggtacggcaagctatctcagcaatcaattgatgaactcagatcaggcgcgcgtatccgtgtcggcgagaagaaagaggatgcgctggactttgctctttggaaagctgctaaggacggagaaatttcatgggatagcccttggggaaaaggccgcccgggctggcatattgaatgctccgcaatggtgaaaaagtatttgggtgacgaaatcgatattcatgccggcggtcaggacctgacattcccgcaccatgaaaacgaaatcgcccaatctgaagcattaacaggcaagacattcgcaaaatactggcttcacaacggatatatcaatatcgataatgagaaaatgtcaaaatcgctcggcaactttgttttggtgcacgatatcattaagcaatatgacccgcagcttttgagatttttcatgctgtccgttcattaccgccacccgatcaactattcggaagagctgcttgagaaaacaaaaaacgcgtttaaccgcctgaagacggcctacagtaatttaaaccatcgtttgattagcagcacgaatctgactgacaatgatgaggaatggctcgctaaaatcgaagagcaccgcactgcgtttgaagaagcaatggatgatgattttaatacggcgaatgcgatttccgtttggtttgatctggcgaagctcgccaattactacatgcaggaagacaatacggcggatcacgtcattaaagcctttatcagcatgtttgacagaatcggatctgttctcggacttacgctcggcgaagaagagcttgtcgacgaagagattgaagagttgattgagaagagaaatgaagcccgccgcaatcgcgattttgctttgtcagaccagattcgcgatcagctgaaaagcatgaatatcattcttgaagatacggcccagggaactcgctggaagcggggagagtaagcggatgcttcaatttgaacaaatcaaagattcaaagcagttaaacggtcttgcgcttgcttatatgggtgatgccatttttgaaatatacgtccggcatcacctgcttaagcagggctttacgaaaccgaatgaccttcataagaaggcgagccggattgtatcggcaaaatcacaggcagacatattgttccgccttcaggacgaatcctttttcacggaggaagaggaagccgtgctgagaagaggcagaaacgcgaaatcagggacgacgcctaaaaacacagatgtacagacgtaccgccatagtacagcttttgaggctttactcggatacctttttcttgagaaaagagaagaaagactgaatcagctgattgctgaggctatacaagtcgggacgtcagggaggaaaacaaatgagtcagcaacatgattacgtcataggaaaaaacgcggtgattgagacgttgaagtcagatcgcaagctgtataagttatggatggcggaaaacacagtaaaaggacaggcccagcaagttatggagcttgctaaaaagcgcggcgtcaccattcaatttgtaccgaggaaaaaactcgatcagatggtggaggggcagcatcagggtgttgtcgcccaggtggcggcatatgaatatgcacaattagacgaattatataaaagagcggaagagagaaacgaacagcctttctttctcatactggacgagctggaagaccctcataatctcggttccatcatgagaacggctgacgctgtcggtgcacacggcatcgtgattccgaaacgcagagcggtcggactgacttcgacggtcgcaaaagcttcgaccggtgcgattgaacacattcccgtcgtgaaggtgaccaaccttgcccggacacttgatgaaatgaaggagcgggggatttgggtcgtcggaacggatgcatccgcccgggaagactaccgctctatggacggcaagatgcctttggcgctcgttatcggaagcgaaggcagaggaatgggccggcttgtgaaagagaaatgtgattttctcattaagcttccgatggccggaaaagtcacgtctctgaatgcgtcggtagcggccggccttctcatgtatgaagtctaccggaagcgcaatcctttaggggaatgaagacagatggacatcctgttagtagacggatacaacatgattggagcttggccgcagctaaaggatttaaaagcgaacagttttgaagaagcgagagatgtactgatccagaagatggcggaatatcagtcctacacgggaatcagagtcattgtggtgtttgacgcacacctggtaaaaggcatagagaaaaaacaaacgaatcacagagtcgaagtgattttcacacgggagaatgaaacggcggatgagcggatcgagaagcttgcccaggcgctgaataatattgcgacacagattcatgtcgcaacctccgattatacggagcagtgggcgattttcggacaaggggctctccgtaaatccgcccgggagctcctgagggaagtggatacgatagaacgccggattcaaaggcgggtttcaaagatcacttctgaaaaaccaccgggtaaaatcgagctgtccgaagaggttttgaaaacgtttgaaaagtggcgccgaggcggtctggattaggttgacgctttttcgcccattaatgtataatatttctatctacgtgcgccggggggatcgcagtgaatctacagaacagcaagggaaagttcaacaaagtgcaattttgccagttggaggacgagcaggtcattgaaaaggttcatgttggggatagtgatgcgttagattacttgattacgaagtaccgtaattttgtacgggcgaaagcaaggtcttattttttaataggggccgacagagaagatattgtacaggaagggatgataggcttatataagtctatccgagactttagagaggacaagcttacttcatttaaagcttttgcagaattatgcattacccgccagattattaccgcaataaagacagctacccgtcagaaacacattcctttaaattcctatgtttctttagacaaacctatttttgatgaagaatctgacagaacactgcttgatgtcatttcaggcgctaaaacgttaaatcctgaagagatgattattaatcaggaagaatttgatgatatcgaaatgaaaatgggagaactgctgagcgatctggagagaaaggtgcttgttttgtacttggacggaagaagttaccaagagatttcagatgacttaaaccgacacgtaaaatcaatcgataatgccctgcagcgcgtgaagcgcaagcttgaaaagtatttagaaataagagagatcagcctgtagcaggtttctgtgtcatattgacagaatttttctgactgtgctattttattaagataaatgaatgtttaggaaaaggtgtaacgacatgagaaaaaagattacgctggcatgcaaaacatgcggaaatcgtaattatacgacaatgaaaagctctgcatcagcggctgagcggttagaagttaagaagtactgcagcacttgcaattcacatacagctcatttagaaacaaaatagtgttcgctttttaaattgtggaggtcttttacatgcgcatgatgagtttctttaaagatgttgggaaagaaatgaaaaaggttagctggcctaaaggcaaagagttaacgcgctatacgatcacggtgatttcaacggttatcttttttgttatcttttttgccctccttgatacaggaatttctcaattaattcgtttaatagttgaataatgatcagcaatacgtgctataatagatcataatatcgtttgccaaaacccgttcagcgggttttttattgtgttgttgaaaaaaggattcataggccctgagcctattttttgttttacacttcatttttaaatgcggggagggaaggactgcagagtcctgatagaatggaaaagaattggtatgttgttcatacgtattccggttatgaaaacaaagtaaaagcgaaccttgaaaaacgtgtggaatcaatgggaatgcaggataaaattttccgcgttgtcgtccctgaagaagaagagactgatattaagaacggcaagaaaaaagtagtcaaaaagaaagtgttcccgggttatgtgcttgttgaaatcgtcatgactgatgattcctggtatgtggtccgcaacacgccgggcgttaccggattcgtcggatcagccggttcaggctcaaagccgactccgcttcttcctggcgaagcggaaaccatcttaaaacgcatgggcatggatgagcggaaaaccgacattgattttgaattgaatgagacagtcaaagtcatagacggacctttcgccaactttacaggatcaattgaagagattgattatgataagagcaaagtgaaagtattcgttaacatgttcggccgtgaaacgccggttgaactggaatttacccagatcgacaaattgtaatgtgaaaaaacttgaaattgctatatattaatgataatatagcaaaggtacgtcttggactaatccaaggcagctagcttgatatttcgtcattcatataaagaatgaaaccttgagtgggagggtttaccctattaccacatcacggacttaaggaggtgtgtctcgtggctaaaaaagtagtaaaagttgtaaaattgcaaattcctgctggaaaagctaacccagcgccgccagttggacctgcactaggtcaagccggtgtaaatatcatgggattctgtaaggagtttaacgctcgtacagctgaccaagctggtttaatcattcctgttgaaatttcggtttacgaagaccgttcatttacatttattacaaaaactccgcctgctgcagtattgcttaaaaaagcagctggaattgagtctggttctggtgaaccaaaccgtaataaagtggcaaccgttaagcgcgataaggttcgcgaaatcgctgaaacgaaaatgcctgacttaaacgcagcagacgttgaagcggcaatgcgcatggttgaaggtactgcccgcagtatgggtatcgttatcgaggattaatttgtttcttgtcgggttgcgagttttcacaagttcgcaacccttattcgtgggaggttattccgctataaccacataaggaggaaattttaaaatggctaaaaaaggtaaaaagtacgttgaagctgcgaagcttgtagaccgtgcgaaagcttatgatgtcgctgaagcagtggcgcttactaaaaaaacaaacacagctaaattcgacgctacagttgaagttgcttttcgtttaggggttgaccctcgtaaaaacgatcagcaaatccgcggtgcagttgtacttcctaacggaactggtaaaactcagcgcgtgcttgtattcgctaaaggcgaaaaagcaaaagaagctgaagctgccggtgcagactacgttggcgattctgattacatcgcgaaaatccagcaaggctggttcgaattcgatgtaatcgttgcgactcctgacatgatgggtgaagtcggtaaaatcggccgtgtgcttggaccaaaaggtcttatgccaaaccctaaaacaggaactgttacattcgaagtggaaaaagcaatcggcgaaatcaaagctggtaaagtagaataccgcgttgacaaagctggtaacatccatgttccgatcggaaaagtttctttcgaggatgaaaaacttgttgagaacttcacaacaatgtatgatacaatcctgaaagcaaaaccggctgcggctaaaggtgtttacgtgaaaaacgttgccgttacttctactatgggccctggtgtcaaagtagacgcttctactttcaacgtaaaataatatttgactttagatcagcattctgatatgattcaaaatgttgtaaaatataatatgtcatttataccgtagacagcaggggccgttgaggcttaatatcctgccgaggtgtatatatatcacagctattacgttacgtatgcttgtatatacagcctccatgtccacatggaggctttttatatgaaatcgtcgtcacagtcgtgatcacctagcggtataagtgttacacaaaatctacaggaggtgtaaccatgagcagcgcaattgatacaaaaaaagttgttgttgaagagattgcttctaaactgaaagaaagcaaatcaacgatcatcgttgactaccgcggacttaacgtttctgaagtaactgaactccgtaaacagcttcgcgaagctaacgtagagttcaaagtgtacaaaaacacaatgactcgccgtgcggttgaacaagctgaacttgatggtttgaatgatgtcttaactggaccgaatgcgatcgcattcagtactgaagatgttatcgctccggcaaaagttcttaacgagttcgcgaaaaatcacgaagctctggaaatcaaagcgggcgttatcgaaggaaaagtatcttctgttgaagaagtgaaagctcttgctgaacttccttcacgcgatggcttactttctatgttgcttagcgtacttcaagctccagttcgcaaccttgcacttgcagctaaagcagttgcagaccaaaaggaagaacaaggcgcttaatctgattttaccctaaaataaaacaaatggaggaatttcaaatggctttaaatatcgaagaaatcattgcttccgttaaagaagcaactgtacttgaattgaacgacctagtaaaagcaatcgaagaagaatttggcgtaactgctgctgctcctgtagctgtagctggcggagctgctgctggcggcgctgctgaagagcaaagcgaattcgaccttatccttgctggtgcaggttctcagaaaatcaaagttatcaaagttgttcgtgaaatcactggtcttggcttgaaagaagctaaagaacttgttgacaacactccaaaaccacttaaagaaggtattgcgaaagaagaagctgaagagcttaaagctaaacttgaagaagttggcgcttctgtagaagttaagtaatcttcacttgcctgtaggggaagctcgcttttatgaggcgggctttttctttgcttttctttaagtgccattataaaaggaggttctaataatgagtgatcactattattcagaaaaaccttcagttaaaagcgataaacagacatggtcatttacactgcggaacagatcttatacattcacaagtgacagcggcgttttctcgaaaaaggaagttgatttcggttcgcgtgtcttaattgaagcgtttgaagagccggagatcgatggtgacttcctggatgcaggctgcggttacggcccgatcggtctgtcactcgccggtgaatttacagaccggaccgtgcacatgattgacgtgaatgaaagagccgtagagctgtcaaatgaaaatgcagaaaaaaacggaataaaaaacgttcggatttatcagagtgatttattttcaaatattgattctgctcaaacatttgcttctattattacaaaccccccaatccgcgccggaaaaaaagttgtccatgccatttttgaaaaaagcgctgagcatttaagggcttcaggtgaattgtggatcgttatacagaaaaaacagggcgggccttctgccattgaaaaactgaaggagctttttgacgaagtttctgtggttcaaaaaaagaaaggctattatatcataaaagcaaaaaaagtttgacttgaattttcagctatgttaatattgtaaaatgccaatgtatatattttgcatgatatgctgaaataatcatagtgcatgtataaattatacaaacatggaaatgctaataaaatcggtatttgtttttggatgtggttttcttaattagaaacccttttttcttttgtcttgtaaaagtatttctttatcgtaagagatgcttattacacatataatacgcatgatttgaggggtgaatcagttgacaggtcaactagttcagtatggacgacaccgccagcgcagaagctatgctcgcattagcgaagtgttagaattaccaaatctcattgaaattcaaacctcttcttatcagtggtttcttgatgagggtcttagagagatgtttcaagacatatcaccaattgaggatttcactggtaacctctctctagagttcattgactacagtttaggagatcctaagtatcccgttgaagagtcaaaagaacgtgatgtgacttactcagctccgctgagagtgaaggttcgtttaattaacaaagaaactggagaggtaaaagaccaggatgtcttcatgggtgatttccctattatgacagataccggtacttttatcatcaacggtgcagaacgtgttatcgtatctcagcttgttcggtctccaagtgtatatttcagtggtaaagtagacaagaacggtaaaaaaggttttaccgcgactgtcattccaaaccgtggcgcatggttagaatacgaaactgatgcgaaagatgttgtgtatgtccgcattgatcgcacacgtaagttgccggttacggttcttttgcgtgctctcggcttcggttccgaccaagagattctcgatctcattggtgagaatgaatatctccgcaatacactggataaggacaacactgaaaacagtgacaaagcgcttcttgaaatctatgagcgccttcgtcccggagagccgcctacagtagaaaacgcaaaaagcttgctggattcccgtttcttcgatccgaagcgatacgaccttgcgaatgtaggacgctataaaattaataaaaagcttcatatcaagaaccgcctgtttaaccagcgccttgcagaaacactggtggatccggaaaccggtgaaattctcgctgaaaaagggcagattcttgacagaagaacacttgataaagtactgccatacttagaaaatggaatcggcttcagaaaactttatcctaacggcggcgttgtcgaggatgaagtgatgcttcaatccattaaaatctatgctcctaccgatgcagaaggagagcagacgatcaatgtgatcggcaatgcttacatcgaagaggcgattaaaaacattacgcctgctgatattatttcttctatcagctacttcttcaacctcctgcacggagtgggcgacactgatgatatcgaccatctcggaaaccgccgtctgcgttctgtaggtgagctcctgcaaaaccaattccgtatcggtttaagccggatggaacgtgtcgtacgtgaaagaatgtctattcaagacacgaatacaattacgccgcagcagctgattaacatcagacctgttattgcgtctattaaagagttcttcggaagctcacagctttctcaattcatggatcagacgaacccgcttgctgaattgacacacaaacgccgtctgtcagctctcggaccgggcggtttgacacgtgagcgcgcaggtatggaagtacgtgacgttcactactctcactatggccgtatgtgtccgattgaaacgcctgagggcccgaacatcggtttgatcaactcattgtcatcatttgcgaaagtaaaccgctttggtttcattgagacgccataccgccgcgttgatcctgaaacaggaaaagtaacgcctagaatcgactacctgactgctgatgaagaggataactatgtcgtagcccaagcgaatgctaagctgagcgatgacggttctttcttggatgacagcatcgtagcgcgtttcagaggggaaaacaccgttgtagcccgcaaccgcgtggattacatggacgtatctcctaaacaggttgtatctgctgcgacagcatgtattccgttcttggaaaacgatgactcgaaccgtgccctcatgggagcgaacatgcagcgtcaggctgtgcctttgatgcagccggaagctccgatcgtcggaacgggtatggaatacgtatccggtaaagactccggtgcagccgttatttgtaaacaccctggtatcgttgaacgggtggaagcgaaaaacgtatgggtgcgccgttatgaagaaattgacggccaaaaagtaaaaggcaacctggataagtacagcttgctgaaatttgtccgctccaaccaaggtacgtgctacaaccagcgtccgatcgtcagtgtcggcgatgaagtagtcaaaggagaaatccttgctgacggaccttcaatggagcttggtgaacttgctctcggccgcaacgtaatggtcggcttcatgacatgggatggttacaactatgaggatgccatcatcatgagtgaacgccttgtgaaagatgatgtatacacatctattcacattgaagaatatgaatcagaagcacgtgatacaaagcttgggccggaagagatcacccgcgatattccaaacgtaggggaagatgcgcttcgcaatcttgatgaccgcggaattatccgtatcggtgcggaagtcaacgacggagaccttctcgtaggtaaagtaacgcctaaaggtgtaactgagcttacggctgaagaacgccttctgcatgcgatctttggagaaaaagcgcgtgaagtccgtgatacttctctccgtgtgcctcacggcggcggcggaattatccacgacgtaaaagtcttcaaccgtgaagacggcgacgaacttcctccgggagtgaaccagcttgtacgcgtatatatcgttcagaaacgtaagatttctgaaggtgataaaatggccggacgtcacggaaacaaaggggttatctcgaagattcttcctgaagaagatatgccttaccttcctgacggcacgccgatcgatatcatgcttaacccgctgggtgtaccatcacgtatgaatatcggtcaggtattagaacttcacatgggtatggctgcccgctacctcggcattcacatcgcgtcacctgtatttgacggcgcgcgtgaagaagatgtgtgggaaacacttgaagaagcaggcatgtcaagagacgctaaaacagttctttatgacggccgtacgggagaaccgtttgacaaccgtgtatctgtcggaatcatgtacatgatcaaactggcacacatggttgatgataaacttcatgcccgttctacaggtccttactcacttgttacgcagcagcctctcggcggtaaagcccaattcggcggacagcgtttcggtgagatggaggtttgggcgcttgaagcttacggcgcagcttacacgcttcaagaaatcctgactgtgaagtccgatgacgtggtcggacgtgtgaaaacatatgaagccatcgtcaaaggcgacaatgttccagagcctggtgttccggaatcattcaaagtattgatcaaagagcttcaaagcttaggtatggacgtaaaaatcctttcaggcgatgaagaagaaatagaaatgagagatctagaagacgaggaagatgcgaaacaagctgacggccttgcattatcaggtgatgaagcgccggaagaaacagcatctccagacgttgaacgtgacgcagtaacgaaagaatagtctctgattgataaaggcaagtgacatcggttaatccgaagataaaaagggaggtaggccccttgctagatgtgaacaattttgagtatatgaacatcggtcttgcttcaccggataaaatccgttcatggtcttttggtgaagtgaaaaagcctgaaacgataaactatcgtacgttgaaacctgaaaaggacggcctgttctgcgaacgcattttcggaccgactaaggactgggaatgtcattgcggcaagtacaagcgggttcgttataaaggcgtagtttgtgaccgttgcggagttgaagtaacgcgggctaaagtccgtcgtgagagaatggggcatattgaactggctgccccggtttctcacatttggtatttcaaaggtattccgagccgtatgggtcttgtattggatatgtcaccgcgtgcgctggaagaagttatttactttgcttcttacgtcgtaactgacccggccaatacaccgctcgaaaagaaacagcttttatctgaaaaggaataccgtgcgtatctggataagtacggaaacaaattccaagcctctatgggtgcggaagccattaataaacttctgcaggacatcgaccttgtcaaagaagttgatatgttaaaagaagagctgaagacttctcaaggacagcgccgtacacgtgcgatcaaacgccttgaagtgcttgaagccttccgtaattcaggaaacaagccgtcttggatgatcctcgacgtgcttccggttattccgcctgaattaagaccgatggttcagcttgacggcggacgtttcgcaacgtctgatctgaacgacctttaccgtcgtgtcatcaaccgtaataaccgtttaaaacgtctgttagacctcggcgcgccaagcatcatcgttcagaacgaaaaacgtatgcttcaggaagcagtcgatgctctgattgacaacggacgccgcggccgtccggttaccggaccgggtaaccgtccgcttaaatctctttctcacatgctgaaagggaaacaagggcgtttccgtcagaaccttctcggtaaacgtgtagactactcaggccgttccgttatcgtcgtaggtccgcatctgaaaatgtatcagtgcggtttgccgaaggaaatggcgcttgagctcttcaagcctttcgtcatgaaagagcttgttgaaaaaggccttgctcacaatatcaagagcgcaaaacgcaaaatcgaacgcgtgcagcctgaagtatgggatgtacttgaatctgtcattaaggagcatccggtcttactgaaccgtgcccctactcttcacagattaggtatccaggctttcgaaccgacgcttgttgaaggacgcgccatccgtcttcacccgttagtatgtacagcttataacgctgactttgacggtgaccaaatggcggttcacgtacctttatcagctgaggctcaagctgaggcgcgcattctgatgcttgcggcccaaaacatcttgaaccctaaagatggtaaaccggttgttacgccgtctcaggatatggtattaggaaactactacctgacgcttgagcgcgctggagcagtcggcgagggtatggttttcaaaaatacggacgaagcgcttcttgcttatcaaaacggttatgttcaccttcatacgagagttgctgttgcagcgaactcccttaagaatgtgacatttactgaagaacagcgttcaaaattgttaattacaactgtcggtaagctcgtcttcaatgaaattcttccggaatcattcccttacatgaatgaaccaacgaagagcaacattgaagagaagacacctgaccgtttcttcttagataaaggtgctgacgtaaaagctgtgattgctgagcagccgatcaacgcaccgtttaaaaaaggcattctcggtaaaatcatcgcggaaatctttaaacgattccatatcacggaaacgtctaaaatgcttgaccgcatgaaaaacctcggtttcagatattcaacgaaagccggcatcacagtaggggtttctgatatcgtcgttctcgatgacaaacaggaaatccttgaagaagcacaaagcaaagttgataatgtcctgaaacagttcagacgcggtttaatcaccgaagaagaacgttatgaaagagtcatttcaatttggagttcagcgaaagatgttatccaaggcaaactgatgaaatcattagacgaagtcaatccgatctacatgatgagtgactcaggagcccgtggtaacgcatctaactttacacagcttgcgggtatgcgcggtctgatggccaacccggctggacgaatcattgaattgccgattaaatcaagtttccgtgaaggtctgacagtattggagtactttatctccactcacggtgcgcgtaaaggtcttgccgataccgccctgaaaacagctgactcaggttaccttacacgccgtcttgttgatgttgcgcaggatgttatcattcgtgaaacagattgcggaacagaccgcggtattcttgcaaaaccgctcaaagaaggcacggaaatcatcgagcgtctggaagagcgtctgatcggacgtttcgccagaaaacagatcaaacatcctgaaacgggtgctgtgctcattaacgaaaatgaattgatcgatgaagataaagcgctggaaatcgttgaagccggaatcgaagaagtgtggatccgttctgcgttcacatgtaacactcctcatggtgtgtgtaaacgatgctacggacgtaaccttgcaaccggaactgatgttgaagtcggcgaagcagtaggtattatcgccgctcaatctatcggtgagcctggaacacagttaacgatgcgtacgttccacacaggcggggttgccggagacgatatcacacaaggtcttccgcgtatccaagagcttttcgaagcgcgtaatccgaaaggtcaagcgacgatttctgagattgacggtacaattgccgaaatcaatgaagtccgcgacaaacagcaggagattgttgttcagggcgctgttgagacacgttcatacacggcaccttacaactcacgcctgaaagtggctgagggtgatcagattacccgcggtcaagtgctgacagaaggttctatcgatccgaaagaacttcttaaagtcactgacctgacaacggttcaggaatatcttctgcatgaggttcagaaggtttaccgtatgcagggggttgaaatcggcgataaacacgtagaagtaatggttcgccagatgcttcgcaaagtccgtgtgatcgatgccggagatactgatgttctccctggcacattgctagatattcaccaattcacagaagcgaacaaaaaagtgctgcttgaaggcaatcgacctgctacaggccgtcctgtccttctcggtatcacaaaagcttcactcgagacggattcattcttgtctgccgcatcattccaagaaacaacacgcgttcttacagatgctgcgattaaaggcaagcgcgatgaacttctcggcctgaaagagaatgttatcatcggtaagctggttccggccggtaccggtatgatgaattacagaaaagtaaaacctgtttcaaacgttcagccttcggaagatatggttccggctgaataatagaaactgctgcaggaaaggctgtttcgacagcttttcctcagtattacaattattctggcggtggactgcactaaaaaatgtcatacgttgttgacatccgtcccgcagagtgataatataaccaaggtgctcgaaataaaacctgttactttggaggatatgtttatgtcttatgataaagtatcacaggccaaatcaattattattggtacgaagcaaacagtgaaagctctaaaacgaggttcagtgaaggaagtcgtcgtggcaaaagacgcggattcagttcttacagctggcgttatccagcttgcaaagaaccaaaataccgctgtctgtatggtggattccatgaaaaagctcggcaaagcctgcggaattgaagtgggagcagcagctgttgccattatgttatagcgtactttttgtttttatataagatatcaatcttgtgtaaagacattgttttttgcctaatgatgaaccacctgggtatgtgggttataaaacgtaatgaagggaggaacacaacatgcctacaattaatcagctaattcgcaagggacgcgtgagcaaagttgaaaactctaagtcacctgcactaaacaaaggatacaacagctttaaaaaagagcacactaacgtatcttctccacaaaaacgcggggtatgtactcgtgtgggtacaatgacaccgaaaaaaccgaactcagcacttcgtaaatatgctcgtgttcgtttgactaacggaatcgaggttactgcctacattcctggtatcggtcacaacctgcaagagcacagcgttgtactgatccgcggcggacgtgtaaaagacttaccgggggtacgctaccacatcgttcgtggcgcgcttgatactgccggagttgaaaaccgtgcgcaaggccgttctaaatacggtacgaaacgtcctaaagcaaagtaatcaaataaatcattaaaactatgaagggaggatattcagatgccacgtaaaggtcctgtagcaaaaagagatgttttacctgatccgctttacaactctaagctggtatcccgcctgatcaacaaaatgatgatcgacggtaaaaaaggtaaatctcaaacaatcctatacaagtcattcgatatcattaaagaacgcactggcaatgatgcaatggaggttttcgaacaagcattgaaaaacatcatgcctgtacttgaagtaaaagcacgccgtgtaggtggagctaactaccaagtgcctgtagaagttcgtcctgaacgccgtacaactcttggtcttcgctggttggttaactatgcgcgtcttcgcggagaaaaaacaatggaagagcgcctggctaacgaaattcttgatgcagctaacaacactggtgctgccgttaagaaacgtgaagacactcacaagatggcagaagcgaacaaagcatttgctcactaccgctggtaggattcatataatcaaaataataattccctaataaggaaggagaaattacccaatggcaagagagttctccttagaaaaaactcgtaatatcgggatcatggctcacatcgatgccggtaaaacgactactacagaacggatcttgttctacacaggccgtatccacaaaattggcgaaactcacgaaggtgcttcgcaaatggactggatggagcaggaacaagaacgcggtatcacaatcacttctgcagcaacgactgcacagtggaaaggttaccgtgtaaacatcatcgatacaccgggacacgtagacttcacagttgaagttgaacgttcactccgtgtacttgatggtgcggttgccgtacttgatgctcaatcaggtgttgagcctcagacagaaacagtatggcgccaagcaacaacttacggagtgccgcgcgttgtatttgtcaacaaaatggacaaaatcggcgcagacttcctttactctgtaggcactttaagagaccgtcttcaagctaacgctcacgcaattcaattgccgatcggcgctgaagacaacttcgaaggtatcatcgacttagtagaaaacgttgcgtatttctatgaagatgaccttggaactcgttcagatgcgaaagaaatccctgaagagtacaaagagcaagctgaagagcttcgcagcagcctgattgaagctgtagctgagcttgatgaagagcttatggaaaagtaccttgaaggtgaagaaatcactatccctgaactgaaagctgctatccgtaaaggtacactgaatgttgaattctaccctgtacttgttggatctgctttcaaaaacaaaggtgttcagcttgtacttgatgctgttcttgactaccttcctgcgccaactgatgttgctgcaatcaaaggtgtacgtcctgacacagatgaagagatcgttcgtcattcttctgatgaagagccattctctgcacttgcatttaaagttatgactgacccttatgtcggtaagctgacattcttccgcgtatattccggtacacttgattccggttcatatgtaaagaactctacaaaaggcaagcgtgagcgcgtaggacgtatccttcaaatgcacgctaacagccgtgaagagatctctactgtttacgctggagacatcgcagctgctgtaggtctaaaagatacttctactggagatactctatgtgatgagaaggatcttgtaatccttgaatcaatggaattcccagagcctgttatcgacgtagcgattgagcctaaatcaaaagctgaccaagataaaatgggtatcgctttagcgaaacttgctgaagaagatcctacattccgtacacaaacaaaccctgaaacaggtcaaacaatcatctctggtatgggtgagcttcaccttgatatcattgttgatcgtatgaagcgtgagttcaaagttgaagctaacgttggtgctcctcaagttgcgtaccgtgagacattccgtaccggtgcaaaagttgaaggtaaattcgtacgtcaatcaggcggacgcggtcagttcggtcatgtttggatcgaatttgaaccgaacgaagaaggcgctggctttgaattcgaaaacgcaatcgtcggtggtgttgttcctcgtgaatacatcccagccgtacaagcaggtcttgaagactctcttgaaaatggtgtcctagccggattcccgctaatcgacatcaaggcgaaactttttgatggatcttaccatgatgttgactcaaacgaaatggcgtttaaagtcgctgcttctatggcattgaaaaatgcagtcagcaaatgtaacccagttcttcttgaaccaatcatgaaagttgaagttgttattcctgaagaatacatgggagacatcatgggtgatgttacttctcgtcgcggacgcgtagaaggtatggaagctcgcggtaacgctcaagttgtgcgtgcgatggtacctcttgctgaaatgttcggttacgctactgcccttcgttctaacacgcaaggacgcggtacgttcacaatgttcatggatcactacgaagaagtgccgaagagcatcgctgaagaaattatcaaaaaaaataaaggcgaataattgattttgccacttaactcaagtataactactattgtaagatgaggaagtgaaagcttgctttcactttctatcactctatacattactaattaaaagctcttaaggaggattttagaatggctaaagaaaaattcgaccgttccaaatcacatgccaatatcggtacaattggacacgttgaccatggtaaaacaacattaactgctgctatctcaacagtacttcataagaaatctggtaaaggtacagctatggcgtacgatcaaattgatggtgctccagaagaacgtgagcgcggtatcacaatctctactgcacacgttgagtacgaaactgacactcgtcactatgcacacgttgactgcccaggacacgctgactatgttaaaaacatgatcactggtgctgcgcaaatggacggagctatccttgtagtatctgctgctgatggcccaatgccacaaactcgtgagcacatccttctttctaaaaacgttggtgtaccatacatcgtagtattccttaacaaatgcgacatggtagacgacgaagagcttcttgagcttgttgaaatggaagttcgcgatcttcttagcgaatacgacttccctggtgatgatgtaccagttgttaaaggttctgctcttaaagctcttgaaggtgacgctgagtacgaagaaaaaattcttgaacttatggctgcagttgacgagtacatcccaactccagaacgcgacactgacaaaccattcatgatgccagttgaggacgtattctcaatcactggtcgtggtacagttgctactggccgtgtagaacgcggacaagttaaagtcggtgacgaagttgaaatcatcggtcttcaagaagaaaacagcaaaacaactgttacaggtgttgaaatgttccgtaagcttcttgactatgctgaagctggagacaacatcggtgcgcttcttcgcggtgtagctcgtgaagacatccaacgtggacaagtacttgctaaaccaggtacaatcactccacatagcaaattcaaagctgaagtttacgttctttctaaagaagagggtggacgtcatactccattcttctctaactaccgtcctcagttctacttccgtacaactgacgtaactggtatcatcaatcttccagaaggcgtagaaatggttatgcctggagataacactgaaatgatcgttgaacttatctctacaatcgctatcgaagaaggaactcgtttctctattcgtgaaggcggacgtacagttggttcaggcgttgtttctacaatcactgagtaatcgactcgttcattaatgcggggtcccttatggggcctcgtttttttgtttccccgctgattccatgtataatagaacgtatacaaattttaggagcagaccgatgaacgataacttcaagaaaaccaatcgtatttcaatgcttcagcaattgctgattaatggcagtgaacaaaccattatgattaatggtgatgacaggagtaatccgctgcttttgtttttgcacggcggtcccggcactcctcaaatcggctatgcgagaaaataccagaataagctggaaaagcatttcaccgttgtgaactgggatcagaggggggcgggtctctcttattcaaaggaaattccgggttcatctatgaccttggatcagctgacagccgataccattcatttgaccgaacgcttatgcaagcaattcagcaggcaaaaaatatatatcgccggttattcgtggggttcagttctggcgcttcatgttcttcaagagagacctgatttgtattatgcgtatatcggtatcagtcaggtggttaatattcaaaaggaagaaacggaagcttaccggctgatgatggaatggagcaggcgacgcaaacatttcctgctggaaaagacgcttagctttatcggagcgcctccatgggagaaacagctgcagcgaacgttgtttctgctttgtatcgagatgaggggagggggctttacccatcatccgatcggcgctcttaaagcagggggacgaatgctgtttggtgaaccgtacggtgtgagagggagcttcttagccgcgcggggacaaatgttcagcctgaaacacctgtgggaggatcttattttctttgatgccggggaatcagtttcttctattataataccgtgctgttttatgtcagggagatacgatttgacggtcccggggacgacgtcttatgaatattatcagaaggttgatgcgccgtataaagaatggcattggtttgagaactcagcccattcgcctcacttggaggagccggatcgctttgccgaagttgtcagccggttcgcatcgttccatctctgaaagaaaacaggcatatccttgattaatcatggtatcacctgtataataatcaaagtgtgaaaaccacaaggttctttaaataaaccttgcaacatgcgtctattttctgtataatagtgtatgttggtctttgactgcgatgaagtgagaggttgctgacacacccggccgctttgccatggcaaggtgatcaggtttttctcacggagaactgtctaacgtgatgtaggcgaaaaggagggaaaataatggcaaaacaaaaaattcgtattcgtttaaaagcatatgatcatagaatccttgatcaatctgcagagaagattgttgaaacggcaaaacgttctggtgccagcgtatctggtccgattccgttgccaactgaaaaatcagtttacacaatccttcgtgcggtgcacaaatacaaagattctcgtgagcaatttgaaatgcgtacacataaacgtttaatcgacattgtgaacccaacaccacaaactgttgatgctctcatgcgattagacttaccatctggtgtcgatatcgaaatcaaactttaattctaaaatatagaatgatcttaataggaggtgtgacgaatgaccaaaggaatcttaggaagaaaaattggtatgacgcaagtattcgcagagaacggtgatcttatcccggtaactgttattgaagcagctccaaacgttgttcttcaaaagaaaacagctgaaaatgatggctatgaagcgatccagcttggttttgacgataagcgtgaaaagctttcaaacaaaccggaaaaaggacacgttgcaaaagcggaaactgctcctaagcgcttcgttaaagaattacgcggcgtggatatggatgcgtatgaaattggtcaggaagtcaaggttgaaattttctctgcaggagaaatcgtagatgtaacaggagtatctaaaggtaaaggtttccaaggtgcaatcaagcgccacggacaatctcgcggacctatgtctcacggttcacgctaccaccgtcgtcctggttcaatgggacctgtagatcctaaccgtgtattcaaaggtaaactattacctggacgcatgggcggagatcaaatcactgtccaaaaccttgaaatcgtaaaagtagatgctgagcgcaatcttcttttgattaaaggtaacgtacctggtgcgagaaaaactttaatcactgttaaaagtgctgttaaatctaaataagtctcttaggaaaggaggaaattgatcatgccaaaagtagcattatacaaccaaaacggttctactgctggtgatatcgaattaaacgcgtctgtatttggaattgagccaaatgagagcgtagtattcgacgctattcttatgcaaagagcttccttacgtcaaggatctcacaaagtaaaaaatcgttctgaagtacgcggcggaggtcgcaaaccatggcgtcaaaaaggtacaggtcgtgcccgtcaaggttcaatccgttcaccgcaatggcgcggaggtggtgtcgtattcggcccaacaccacgcagctattcttacaaattacctaaaaaagttcgccgcttggcaatcaaatcagtattgtcttctaaagtgaacgacaacaacattattgttcttgaagatcttactcttgatacggttaaaacaaaagaaatggcagctatccttaaaggattatctgttgagaaaaaagctttaatcgtaactgcggatgcaaacgaagcagtatctctttctgcacgcaacatccctggagttacagttgttcaagctaacggaatcaacgtgttagacgttgtcaaccacgagaagcttctgattacaaaagctgcggttgaaaaagtagaggaggtgcttgcataatgaaagatcctcgtgatgttcttaagcgccccgtcattactgaacgttctgctgatttaatgactgaaaaaaaatatacttttgaagttgatgtaagagctaataaaacagaagtgaaagatgcagttgaaagtatctttggagtgaaagttgacaaagtcaacatcatgaactacaaagggaaatcaaaacgtgtcggccgctacactggtatgactagccgtcgcagaaaagcgatcgtaaaacttactgcagacagcaaagaaatcgaaatttttgaagcttaattatctgtaaaaagaaggagggaaattcaaaatggcgattaaaaagtataaaccgacctctaacggacgtcgtggcatgacaacttcagattttgctgaaatcacgactgaccagccggaaaaatccttgcttgcgccccttcacaaaaaaggcggacgtaacaaccaaggtaaattgactgtacgtcaccaaggtggcggacacaaacgccaataccgtgttatcgacttcaaacgcgataaagatggtatacctggacgcgttgctacagttgagtacgatccaaaccgttcagctaacattgcactaatcaactatgtagacggagaaaaacgttacattcttgcaccaaaaggaattcaagtaggtactgaaatcatgtccggccctgaagctgacatcaaagtaggtaacgcacttccgcttatcaacatccctgttggtacagttgtgcataacattgaattaaaacctggtaaaggcggacagcttgtacgttcagctggtacatctgctcaggttcttggtaaagaaggcaaatacgttcttgtacgtcttaactctggtgaagttcgcatgatcctttctgcttgccgcgcttctatcggtcaagtaggtaacgagcagcacgaacttatcaacgttggtaaagcaggacgctctcgctggaaaggcatccgccctacagtccgcggttctgtaatgaaccctaacgatcacccgcacggtggtggtgaaggtcgcgcgccaatcggacgtaaatcaccaatgtctccttggggcaaaccgactcttggattcaagacacgtaagaaaaagaacaaatctgataaatttatcgtacgtcgtcgtaaaaataaataacggggttgtctacggttcatttcggaccgtagtgcaatcacgaagggaggttccaaaatggctcgcagcttgaaaaaaggaccatttgtcgatggacacttgatgacaaaaatcgagaaattaaatgaaacggacaagaaacaagttgtaaaaacttggtctcgccgttcaactattttcccacaatttatcggtcacactatcgcagtatatgacggacgtaaacacgtgcctgtattcatttctgaagacatggtaggccacaagttgggcgaattcgcaccgactcgtacttacaaaggccacgccagtgacgataaaaaaacaagacgctaagagaggaggcttttaaatgcaagctaaagctgttgcaagaacagtccgtattgctcctcgtaaagcacgtctagtaatggacctgattcgaggtaagcaagtaggcgaagcagtatctatcctgaacttaactccgagagctgcttctccgatcatcgaaaaagttttaaaatctgctatcgcaaatgctgagcacaactacgagatggacgctaacaatctggttatttctcaggcatttgttgacgaaggcccaacgttaaaaagattccgcccgcgtgctatgggacgtgcgagccaaatcaacaaacgtacgagccacattacaatcgttgtatcagaaaagaaggagggataagtagtgggtcaaaaggtaaatccagtcggtcttcgtatcggagtcattcgtgattgggaatctaagtggtacgctggtaaagattacgctgacttcctgcacgaagatttaaaaattcgtgaattcattagcaaacgcctttctgacgcttctgtttctaaagtagaaatcgagcgcgcagcaaaccgcgttaacattacgatccacactgctaagcctggtatggtaatcggtaaaggcggatctgaagttgaagcacttcgtaaagcccttaacagccttactggcaagcgtgtacacattaacattcttgaaatcaaaagagcagatcttgatgctcagcttgtagctgacaacatcgctcgtcaactagaaaaccgtatttctttccgccgtgcgcagaaacaacaaatccaacgcactatgcgtgctggagcacaaggtgtgaaaacaatggtttccggccgtcttggcggagctgacattgctcgttctgaatactacagtgaaggaactgttccattgcacactttacgtgctgacatcgactatgcaacatctgaagctgacacaacttacggtaagcttggtgtaaaagtctggatctatcgtggagaggttcttcctactaagaagaaaactgaggaaggaggaaaataatatgttattaccaaaacgcgttaaatatcgcagagagcatcgcggaaaaatgcgcggtcgcgctaaaggcggtactgaagtacattttggtgagtacggtatccaggctcttgaagcttcttggatcacaaaccgccaaatcgaagctgcacgtattgcgatgactcgttacatgaaacgtggcggtaaagtttggattaaaattttcccttcaaaaccttacactgctaaaccgcttgaggtacggatgggttccggtaaaggggctcctgaaggctgggtagctgttgtaaaaccgggcaaagttttatttgaaatttctggtgtgtctgaagaggtagctcgtgaagctcttcgtcttgcatctcacaaattgccaattaaaacgaagttcgtaaaacgtgaagaaattggtggtgaatcaaatgaaagctaatgaaattcgtgaccttaccactgctgaaattgaacaaaaagtaaagtctcttaaagaagaacttttcaatcttcgctttcaattagcgacaggacaacttgaaaatactgctcgcattcgtgaagtgcgcaaagctatcgcgcgcatgaaaactgtgattcgtgaaagagaaattgctgccaacaaataatcactgaggggaggtcgtgagcatgagcgaacgtaaccaacgcaaagtttaccaaggccgtgttgtttctgacaaaatggataaaaccatcactgttgttgttgaaacatacaaaaaggatcctatttacggtaaacgcgtaaaatactcaaagaaattcaaagcacatgatgaaaataaccaagctaaaatcggagacatcgtaaagatcatggaaactcgtccattatctgcaactaagcgttttcgtctagtagaagttgtcgaagaagctgttattatctaataaagttcggaattctttttccgaagggaggtaacaaataatgattcaacaagagactcgtttaaaagttgctgacaactccggtgcgcgtgaggtacttactattaaagttcttggcggttctggacgtaaaacggctaacattggtgatgtaattgtttgcacggttaaacaagcaacaccaggaggcgttgtcaaaaaaggtgaagtcgtaagagctgttatcgttcgcacaaaaagcggagcacgcagaactgacggatcatacatcagcttcgatgagaatgcatgtgttatcatccgtgacgacaagagcccgcgtggaactcgtatcttcggaccggttgcccgtgaattacgtgaaaacaacttcatgaaaattgtttctctggctccagaagttatctaatgaaataaatgccttactcaaggaggtgcgatcaggatgcatgtgaaaaaaggcgataaagtaatggttatctctggtaaagataaaggcaaacaaggtacgatccttgctgctttccctaaaaaggaccgcgttctagttgaaggcgtaaacatggtgaagaagcactctaaaccaactcaagcaaaccctcaaggcggtatttctaatcaagaggcgccaattcatgtatcaaacgttatgccgctcgatcctaaaacaggtgaagtgactcgcgtaggatacaaagtggaagatggcaaaaaagttcgtgttgcaaaaaaatctgggcaagtcttagataaatagtatttaaaggaagggaggtctatctcatgaaccgccttaaagaaaagtacaataaagaaatttcacctgctttaatgacgaagttcaactacgactctgttatgcaggtgccaaaaatcgaaaaaatcgtaatcaacatgggtgtcggtgatgctgttcaaaacgcaaaagcaatcgacagtgctgttgaagaattaacgtttatcgcaggtcaaaaacctgtcgttactcgtgcgaagaaatcaattgctggattccgtcttcgtgagggaatgcctatcggtgcgaaagtaactcttcgcggagagcgcatgtatgatttccttgataaacttatttctgtatctttaccgcgtgtacgtgacttccgcgggatttctaagaaatctttcgacggtcgcggaaactacactcttggtatcaaagaacagttaatcttccctgaaattgactacgataaagtaacaaaggttcgcggaatggacatcgttatcgtaacgactgctaactctgacgaagaggctcgtgagctattaactcaagtaggtatgccgttccagaaataatcaatgaaagggaggcgaaatcgtggctaaaaagtcaatgattgcgaaacaacaacgtacaccaaagtttaaagtgcaagagtacactcgctgtgaacgctgcggacgtccgcactcagtcattcgtaaatttaaactttgccgtatttgtttccgtgagcttgcatataaaggacaaattcctggcgtgaaaaaagccagctggtaatccccaagaatgggaaggaggtaattatataatggttatgacagatccaattgcagatatgctgactcgtattcgcaatgcaaacatggtacgtcatgagaagcttgaaattcctgcttctaaattgaaaagagaaattgctgacattttaaagcgtgaaggtttcattcgtgacgttgagttcgtagaagacagcaaacaaggtatcatccgcgttttcttgaaatacggacaaaacaacgagcgcgttatcactggtcttaaaagaatcagcaaaccaggtttgcgtgtatacgctaaatcaaatgaagtacctcgcgtacttaacggtcttggaatcgcgattatttctacatcacaaggtgttttaacggacaaagaagcccgtgcaaaacaagctggtggagaagttctagcatacgtttggtaagaagtttaacaagaatggaggtgttttagtatgtctcgtgtaggtaaaaaactgcttgagatcccttctggagttacagtaacgctgaacgaaggcaacactgtagctgtaaaaggaccaaaaggagaattaactcgtactttccatcctgatatggaaatcaaaattgaggacaacgtgcttacagttactcgtccttctgatcacaaagagcaccgtgcgctgcatggtacgactcgcagtctgcttggaaacatggttgaaggcgtatctaaaggatttgaaagaggtttggaattagtcggtgtcggttatcgtgcggctaaatccggaaacaaacttgttttaaacgttggatactctcaccctgttgagatcgttcctgaagagggcatcgaaatcgaagttccttctcaaactaaagtagttgtaaaaggtacagacaaagagcgtgtaggagctatcgctgctaacatccgcgctgtacgttctccagagccttacaaaggtaaaggaatccgctacgaaggtgaagttgttcgccgtaaagaaggtaaatctgctaagtaagaccgcttaaagtgaagaaaggagtgacctaaggatgattacgaaaactagcaaaaatgctgctcgtcaaaaaagacatgcccgtgttcgtgctaaactttcaggcacagctgaaagacctcgtctgaatgtgttccgttcaaacaaacacatttatgctcaaatcatcgatgatgtaaatggcgttacacttgctagtgcctctactctcgataaagatttgaacgtggaaagcactggtgacagcgctgctgctgctaaagtcggtgaactcgttgcgaaacgcgcttctgagaaaggtgtttctgacgtagtatttgaccgcggcggatacttataccatggacgtgtaaaagctctggccgatgcagctcgtgaagccggactgaaattttaataaaaaaaggagggacacatgattatgcgtcgtattgacccaagcaaattagagttagaagaacgcttagttacggttaaccgcgtagcgaaagttgttaaaggtggtcgtcgtttccgtttcgcagctctagtcgttgtcggtgacaaaaacggtcacgtaggtttcggtactggtaaagcacaagaagtacctgaagcaatccgcaaagctgttgaagatgcgaaaaagaatttgattgaagtaccaatggttggaactacgattccacacgaaatcatcggacgtttcggtgcaggcaatatcttgttgaaacctgcttctgaaggtactggagttatcgctggaggccctgtacgtgcggtacttgagcttgctggcgttgctgatatcctttctaagtctttaggttctaacacaccgatcaacatgatccgtgcaacacttcaaggtttaagtgagcttaaacgtgccgaagacgttgcgaagcttcgtggaaaatctgtagaagaactgttaggataaggagggaacattaatggctaaattagaaattaccctcaaacgcagtgtaatcggtcgcccggaagatcagcgcgttactgtaagaacacttggtttaaagaaaacaaaccaaactgtcgttcatgaagataacgcagcgatccgcggtatgattaataaagtatctcatctagtttctgttaaagaacaataaaaataaattataggctaaggaggtgtcctaatgaaacttcatgaattaaagccttcagaaggttcacgtaaagtacgcaatcgcgtaggtcgtggtattggttctggtaacggtaaaacagctggtaaaggtcacaaaggtcaaaacgctcgttctggcggaggtgtacgccctggattcgaggggggacaaatgcctttattccaacgtcttcctaagcgtggttttacaaacatcaaccgtaaggaatacgctattgtgaacgtagacaaattgaacggttttgcggaaggaacggaagtcactcctgaacttcttcttgagactggtgttattagcaaacttaatgcaggagtaaagattcttggcaacggtaaattagagaaaaaattaactgtaaaagccaataaattctctgcttctgcgaaagaagctgttgaagctgctggcggtacagctgaggtgatctaacttgtttaagacaatctccaactttatgcgtgtgagtgatattcggaataaaatcatttttacattactcatgcttatcgtctttcgcataggtgcgtttatccctgtgccatatgtaaatgctcaggcgttgcagacacaaagttcgatgggggtttttgatctccttaatacatttggcggcggtgcgctttatcagttctccatttttgcgatgggaatcacgccttacatcactgcttcgatcatcattcagctgcttcagatggatgttgtgccgaagtttaccgagtggtctaagcaaggtgaagtcggccgccgtaaattagctcagttcacgagatattttacgattgtgcttggttttatccaggcattaggtatgtcttacgggtttaacaacctggcaaacggtatgctgattgaaaaatccggcatatcgacatatctgattattgctttagtactcactggaggaactgcttttttaatgtggctgggagaacaaattacttccaatggagtaggtaacggaatttcgatcatcatcttcgcggggattgtggctagtattccgaaaactgttgggcagatttatgagactcaatttgtcggcagcagcgatcagctgtttattcatattgtgaaaatcgccttactggtgattgcgattttggccgttattgttggtgttattttcattcagcaggccgtacgcaaaatcgcaattcaatatgcaaaagggcaaggtcgttcacctgttggcggaggccagtcaactcaccttccgcttaaagtgaatccggcaggggttattccggtaatctttgcggttgcgtttcttattacgccgcgtactatcgcgtcatttttcggagaaaacaatgtgacaaagtggattcaagccaactttgacaatacacatccggtgggcatggcggtttatgtcgcattaattatcgcctttacgtacttctatgcttttgtgcaggtaaaccctgaacaaatggctgataacctaaaaaaacagggtggctatatcccgggggttcgtccagggaaaatgactcaagatagaattacgagcattttgtatcgacttacgtttgtgggttctatattcttagccgtgatttccattcttcctatctttttcattcaattcgctggattgcctcaaagtgcacagattggcggaacatcattgttaattgtcgtcggggtagccttggagacaatgaagcagctggagagccagttagtgaaacgtaattaccgaggatttatgaaaaattagaggactggttttaaccattcctctaaataagagaggacgggggaaatccgaatgaacttagtcttaatgggacttcctggagccggtaaaggcacacagggagaacgaattgttgaggattatgggatacctcatatctcaacgggagatatgttccgtgctgctatgaaagaagaaacaccactcggactcgaagcaaagtcttatattgataaaggcgagctcgtaccggacgaagtcacaatcggcattgtcaaagaaagactcggcaaagatgattgtgaaagaggttttcttctggacggatttccgcgaacagtcgctcaggctgaagctcttgaaaacattcttgaggaatacggcaagccgattgattatgtcattaacattaaagtagacaaagactctttaatggaacgtttgactggacgcagaatttgcagtgtttgcggcacaacctatcatttggttttcaatccgccgaaaacgccgggtgtttgtgataaagacggaggagacctttatcaacgggcagatgataatgaggaaaccgtctcaaaacggcttgaggtcaacatgaagcagactcagcctttactcgatttttattctgagaaagggtatcttgtcaacgtcaatggccagcaggacattaacgacgtgtacaaagatgtgaaagagcttcttggaggattgagcaaatgattatctgtaagacccctcgtgagcttggcatcatgcgggaagcagggcgaatcgtggctttgactcatgaagagatgaaaaagcacattaaaccaggaatctcgacaaaagaattggatcaaattgccgaacgttttattgagaagcagggtgcaatcccatcttttaaggggtataatgggtttcgcgggagcatctgtgtatcagttaatgaagaactcgttcacggaattcccggtaaaagggttttgcgtgacggtgacattatcagcattgatatcggtgctaaattaaatggttatcatggtgactctgcttggacatatccggtaggaaacatcagtgatgatgataaacgactgctggaagtgacagaggagtctttatataaaggcttgaaggaagcaaaaccaggtgaacgtttgtcgaatatttcccacgcaatacaaacgtatgtcgaaaatgagcagttttcagttgttagggagtatgtcggacatggtgttggtcaagacttgcatgaggatccgcaaattcctcattacggtccgccaaacaaaggacctaggctgaagcctggtatggttctcgctatagaaccgatggttaacgctggcagccgatatgtgaaaacattggctgataactggacggttgtaacggtagatgggaaaaagtgtgctcattttgaacatacgattgcgattacggaaacgggttttgatatactgacaaaagtctagatgatgaaatgaattccatgacacatgtttttcattccgcacctgggcagattgtaggtttacaattggtcggaagaaaaaccggctagctgctgtcaccggaatgaagattcatcatcgtgtactaaagcagacggagaaaagcgtacatttcattctccttagaaatagaatatcaatcattcaccctttatgattgcgtatctccggaagttcagaacagtataaacgaaacagggcgtgtgacaaacggataactgagattttctcttttgaaatttgtcagagagcaagttactgatttgaagaagggagaacacttgaatggcgaaagacgatgtaattgaagtggaaggtacgattgtcgaaacactgccaaacgcgatgttcaaagttgaactcgaaaatggccatacggttttggctcacgtatctggtaaaatccgcatgcacttcattcgcattttacctggagacaaagttacggtagaattatctccatatgacttaactcgtggcaggattacgtaccgttacaaataaagcactccggaaactgaaggaggttggaaacacatgaaagtgagaccatcagttaaaccaatctgcgagaaatgtaaagttattcgcagaaaaggaaaagtaatggtgatctgtgaaaatccaaagcataaacaaaaacaaggataattaataaggaggtgcccagagaatggctcgtattgctggtgtagatatcccacgtgacaaacgtgttgttatttctttaacatatgtcttcggaattggccgcacaacggctcagcaagtcttgaaagaggctggtgtttctgaagatactcgtgtgcgtgatcttactgaagaagaacttggtaaaatccgtgatgttattgacaaactgaaagtagaaggtgaccttcgccgtgaagtttctcttaacatcaagcgtctgatcgaaatcggaagctaccgcggaatccgccatcgcagaggtttgcctgttcgcggacaaaactctaaaaacaatgcgcgtactcgtaaaggtccgcgtcgtactgtagctaacaagaaaaaataagtaagggaggtacctaaacaatggctgctgctcgtaaacaaaacacgcgtaaacgtcgcgtgaaaaagaatattgagtcaggaatcgctcatattcgttcaactttcaacaacacgatcgttacgatcactgatactcatggtaatgctctttcttggtcaagtgccggagctctaggattcagaggttctcgtaaatctactccttttgctgcgcaaatggctgctgaaacagctgctaaaggttcaatcgaacacggacttaaaactcttgaagtaactgttaaaggaccaggttctggccgtgaagctgcaatccgtgctttacaagctgccggacttgaagttacagctatcagagacgtaactcctgttcctcataatggatgccgtccaccaaaacgtcgccgcgtgtaatttgtttgtatagattttgtgtccctgtcaataatgggttatgatacagttatttatgaaacgaatgcaccgactcgttgcctgagcacatacgggactaaacaatggggaatttcggatggaatctcatatgattctattcgaggtttcgacgttttgaaggagggttttaagtaatgatcgagattgaaaaaccaaaaatcgaaacggttgaaatcagcgacgatgccaaatttggtaagtttgtcgtagagccgcttgagcgtggatatggtacaactctgggtaactccttacgtcgtatcctcttatcctcactccctggtgccgctgtaacatcgatccagatagatggtgtactgcacgaattctcgacaatcgaaggcgttgtggaagatgttacaacgataatcttgcacattaaaaagcttgcattgaaaatctactctgatgaagagaagacgcttgaaattgatgtacagggcgaaggaactgtcacagcagctgatattacacacgacagcgatgttgaaatccttaatccggatcttcatattgcgactcttggtgagaatgcgagtttccgagttcgccttactgcacaaagaggacgtgggtatacacctgctgattcgaacaaaagagacgatcagccaatcggtgtgattccgatcgattcaatctttacgccagtttctcgtttatcttatcaggtagaaaacactcgtgtaggccaggttgcaaactatgacaaacttacacttgatgtttggactgacggaagcactggaccgaaggaagcaattgctctcggttcaaagattttaactgaacaccttaatatattcgtcggtttaactgacgaagctcagcatgctgaaatcatggttgaaaaagaagaggatcaaaaagaaaaagttcttgaaatgacgattgaggaacttgacctttctgtccgttcttacaactgcttgaagcgtgcgggcattaacacggttcaagaacttgcgaacaagacggaagaagatatgatgaaagttcgcaacctgggacgcaaatcacttgaagaagtgaaagcgaaactagaagaacttggactcggccttcgcaaagacgattgatctagtttccatgtgaactaggattttcgtgtgttttttatttagaaacagcattccattaaaggaggggacatcacatgtcatacagaaaactaggacgtacgagttcacagcgtaaagctatgcttcgtgatcttacaacagatttgatcatcaacgaaagaattgaaacaactgaaacacgtgcgaaagaacttcgctctgttgttgaaaagatgatcactcttggtaagcgcggtgacttgcatgctcgtcgtcaagcagctgcatacattcgcaacgaggttgctaatgaagaaaataaccaagatgcacttcaaaaattattctctgacattgcaactcgttacgaggagcgccaaggcggatacacacgtattatgaagcttggtcctcgccgtggtgacggtgcaccaatggcaatcatcgaattggtttaatcacatatttttgtgtatctaaagaagggcgggacagtttctaactggatctatgccctttttttagatatcagaactttttatcatgagacagaaaagcagagctatagctgagaggaggtcaggcgcccgtggatcaaaaacagcttatatccgtaaaagacactctattccgttaccgcaaagatgcagaaagaccggcgctggacggtgtgagtctggaggtatacgaaggagaatggcttgctatcgtaggccacaacggttcagggaagtcgactttggccagagcgctgaacgggctgattttgcccgaggccggagaaattgaagtcggcggcatcaaactgactgaggataccgtgtgggatgtgcgaaaaaaaatagggatggtctttcagaatcccgataaccaatttgtcggaacgactgttcgcgatgatgtggcttttggtttagaaaacaatggtgttccgcgcgaagaaatgattgagagagtagattgggctgtcacacaagtcaatatgcaggattttcttaatcaagagccgcaccatctctccggaggtcaaaaacaaagagtggcgatcgcgggaattattgccgcgcgtcctgatattatgattttggatgaagcgacatccatgcttgacccgattgggagagaagaagtccttgatactgtcaggcgcttaaaagatcagggcatggccaccgtcatttcgataacacatgacctggaagaagccgcaagggcggacaggatcattgtgatgaacggcggcaggaaatatgcagagggcacgcctgaagagatttttaaattaaacgaagacttggttcgcatcggtcttgatttgcctttctcattccagctcagcctgcttttgaaagaaagcggactggcgttaacgaaaaaccatctgactcaggaagggctggtgaatgagctgtggacattaaaatcaaagatgtagaacaccgctatcaaatgaagacaccgtttgaacggttggctctgtatgatatcaatgccgtgataaaagagggcagctacgttgccgtcatcgggcatacagggtcgggcaaatcgacgctcctgcagcatttaaacggtttgctgaaaccgactaaaggacagcttgaactcgggagcacgattctggcagccggtaaaaagaataaagaccttaagactttgcgaaaaaaagtcggaatcgttttccaatttcccgaacatcagctgtttgaagagactgtgctgaaggacatcgcattcggaccgatgaattttggtgtgaaaaaagaagacgctgaacggaaagcaaaagaaatgctggggcttgtgggccttccggaagacattttggatcattcaccatttgagctcagcggcggccagatgcgcagagtggcgattgccggcgttctcgcgatggagccggaagtgctggttttggatgaaccgacggccggtcttgatccgagagggcgccaggacattatggacatgttctatgcgcttcatcagcggggaaacctgactaccgttctcgtcacccacagcatggaggacgccgcccgttatgctgacgaaatgatcgtcatgcacaaaggaaccattaaagcgacggggagtccgcgtgacttgtttgtaaaaggtgaagagatggccgaaatgggactggatcttcctgaatcggtgaagtttcagagacggcttgagaaggctctcggagtcaagtatgaaaaacccatgctgaccctgcaggatgccgccagtgaaattaaggctttctttcaggaggagaaggaccaatgatggacagcatgattatcggaaagtatgttcccggatcatcgcttattcaccgattggacccgcgaacaaaacttgtcagcatttttctttttgtatgtatcgtctttttggcaaacaacgtacagacgtacgctgtgctcggtttgtttacattcggagtgatcgccttgactcgcgtgccgttcagctttttgctgaaggggcttaagccgattatttggattgtggcgtttacctttttattacacattttcatgacgcatgaaggatctgtcatttttcagcttggctggtttaaagtgtatgagggcggacttatacagggtatttttatctccctccgtttcgtttaccttatctttatgacgacgctgctgacgctgacaacaacgccgattgaaataacggatggaatggagcagctcctgaatccttttaaaaaggtgaagctgcccgtacacgaactcgcattgatgatgtcgatatcattgcgatttatcccgacattgatggaagagacagataaaatcatgaaggcgcaaatggcgaggggtgcggactttacaagcggcccggtgaaagacagaatcaaagcggttgttccgctgcttgtcccgctgtttgtcagcgcctttaaacgcgcggaagagctcgcggtcgccatggaggcgagaggctaccagggcggtgaggggagaacgaaatacagaaagctcgtctggaccggaaaggataccggagctattctgctcatcatggtattagccgtgttattgtttttcttaagaagttagaggtgctgctgaatgagagtgaaatgtaccattgcttatgacgggcatttatttaacggatatcaggttcagcctggaaagcggaccgttcaaagtgaattggaaaaagcgctggccgtcatccataaaacggacggcagagtgcctgtcatctcatccggccgcacggacagcgatgttcatgctgccgggcaggtcattcattttgatacgccgctgtccatcccggctgagaaatggccgtttgcgctcaatgccctgctgcctgatgatattgccgtcaaaacagcagagattgcggatgatgggttccatgcacgatttagcgcggtccaaaaggaatatcgctactttgtatatacggagaaacacccggacgtatttaaacgacattacgcttaccattttgcatatccgcttaatgtgcagaaaatgagggaagcttcaaggcacctcatcgggacacatgatttcacaagcttttgcgcggctgataccgcggttcaggataaagtcagaacgatttacgagctggattggactgagaccggagacggcctgcagatgcggatcaccggaaacggttttctctataatatggtcagaatcattgccggaacattattggataccggagctggaaaattttctcccgatgatgtaaaagcaatgctcgaagcgaaggatcgcgaagccgcggggcgcaccgcaccggggcacgggctgtatttatggagcgtttgctatgacaactaaaccaggtgtaacattttcttgacagagtctgcataaagttataagatatcatatggtatgtatttcaaccccacgataagccccggaacttattgtgttgtgaaatagaacgtaatcgaagattattgaaaatgacagatcatttaggagggaaattcaatgcgtacaacacctatggctaacgcaagtactattgaacgcaagtggttagttgttgatgcagcaggcaagactttaggacgtctttctacagaagttgcatctatccttcgcggaaaacacaaaccgacttacacaccgcacgttgatactggagatcatgtgatcatcatcaacgctgaaaaaatcgagttaactggtaaaaagttaactgacaaaatctactaccgtcacactcaacatccaggcggattaaaatcaagaactgctcttgaaatgcgtacaaactaccctgagaaaatgcttgagcttgctatcaaaggcatgcttccaaaaggttctctaggtcgtcaaatgttcaagaaattgaacgtataccgtggttctgagcatccacatgaagcacaaaaacctgaagtttacgaacttcgcggttaattaaaaaggaggttaccaatttggcacaggttcaatattacggtactggccgtcgtaaaagttctgtagcgcgtgtgcgcttagttccaggtgaaggtcgtatcgtcgttaataatcgtgaaatcaacgagcacattccatctccagctctaatcgaagatatcaaacaaccattaactttaactgaaacagctggtacttatgatgttttagtaaacgtacatggaggcggcttatctggtcaagctggagcaatccgtcatggtatcgctcgtgctttgcttgaagcagatccagaataccgtgcaacacttaaacgtgctggtcttctgactcgtgacgctcgtatgaaagaacgtaaaaaatacggtcttaaaggcgctcgtcgtgcacctcagttctcaaaacgttaatcgttttggatggcaaaaaccacaacttcttggttgtggtttttttgtatttttttctcatattcaagaggttatccgatgtttttctagaattgtttgttatactctattcattaccaataaggagcgcagttataatgaataagttagtcatacataacagcaaggcatgggataaaaaagtcgaaacaggcaatgaatggacggttgcggttgattctcatacgattggtgaagcgaaaaaaggcaattggagcatcagaatgacccccggaaaagatgtgccggcggactggtttccgcccatagacggtctgaaggttctttgtctcgcttcaggaggaggacagcaagggccggtccttgctgctgcaggagcggatgtgaccatctttgacaattcggaaaaacagcttgcgcaagacagaatggttgccgggcgggacgatcttacgcttcggactgtcaaaggcagcatgaatgatctgagctgttttgatgatgagtcatttgattttatcgtgcacccggtatcgaattgctttgttgatacggttcttccggtatggaaagaagctcatcgcgtattgaaaaaaggcgggtctttagtctccggttttgtaaatcccgtcgtgttcttatttgatatggatttagagcaggaaggcgtactaaaagtaaagtattccattccgttttcggatgaaaaagatctgagtaagaaaaaggtaaaggaacttattgataatcatgaagcgcttgaattcggccatacgctggaggatcaaattaaaggtcagattgacgcaggcttcatggttgccggtttttacgaggacaaaggcggcctcgtgctggatgaatacattaatacatactccgtaacaagaagcattaaaatataaaaacggcatcccgtcagaggtgctgtttttttgcggctttttcctgcggacggctgatcacattagccgaaaccggttctattccaatgtctctggcccaaaccgacagttgtcccatatggtgaatctcatgcgcaaggatgtggcggagaatatcttctttaggaaaggtttggtccatccagtccggcttaacaagatccggtcctttgagggagaccgcatgaatgacatcctcccgatactgttcagacagctttctgagatcctgaatgcttgtatagtcagactcagcaggtaaaacatcatctttacctaaaatggcacgagcccagctgatctcgacatcaatgatatgaaataaagtccgcaagatgctctccattccgcccgtccgggttttcgtcagttcctcccggctcagcttttcacatatcataaaccactcgtcacgcaccgtccaattgtattgaaacagctttttcatcacgtcacctcagctctttcttcttccagttaacataaaactccttcatttgggaggatttccactatcaacaaagcatgctttttcccttttcctttcaaaataacagtaaaaaggagcgtggctggcaatggcagaagtattatctttttcagacgtgaaacggcagaaggattttgagcttgagaagagtttactaaaggagctgtcactgacgcagatcattcagtccgtaaaagcatgtcttacccctttgtttccctttcttcaagacgaaaacggcattctgagtgaaggatgcatagattttgcaattgaagcgtatttattaggcggccggttcggcgtctttggctattatggtgagtccttgcagagggcaaacgcccgttcggctgaagaagaggaagaactgacggtcgatttttttgaatatctttgcaattggacgcatgagcaatattcttccgttgaacaaaaagaaatctatgaagcgtcctgccggtttatcaacagctggtggacggaaggatttctgcaaagagaaaaacaatgtaagctccgcatgaggtaatcataatttcttcccttgtcccatacttattaataacggggacaagcgggagggaaaggtatgacaaaaaagctgaaatggctcggttttttacttggctttatcatattattgtgtttattccggtttcaattccataatgatgattcctggcggccgtggagtctgccgctgagcgggaaaatcatctatctcgatccgggacacggcgggccggacggaggcgccacgggaggcagtcaccttgaaaaggacattactctcgaagtggcctccagggtcagagactatttgcaggagcagggagctttggtcattatgacgcgggagacggatactgatttagctcctgaagggacgaaaggctacagcagacgcaaagcggaagatctgagaaagcgcgtggaaatcatcaaccgttcagaggcggagctttatatcagcattcatctgaacgccataccgtcaccgagatggagcggcgcccaaagcttctactatggaaaatacgaagaaaatgaaaaagtggcaaaatatatacaggacgaattgagaatcaatttggagaatacaacgagaaaggcgaaacggatacacggcatttacttaatgcagaatgtaaccaaaccgggcgcgctggtggagatcggatttctgtccaatcccgcggaagcgaaaaggctcggccagcccaaatatcaggacaaaatcgcttcttccgtgtataagggcgtattgagatacttcacagagaaaggagaccctcccgagtaaggagggtttttcgccgattctatgtttaatatatggtataataccatttgtaaacgaatacacaaagggtgagggttcgatgataagagaagatgaagtaagaaatatagtcggaaacatgcgcgaaccttttcttcatagaccgctgggagaattggatgccattaaagaagtaaagatcaagccggaaaaacggcatgtcagtgtgaaaattgcattggcaaaaacggggacggctgaacagatgggtattcagcaggaaatcgtatccgttctgaaagaagcgggtgcggaaactgtgggactgcggtttgaagagctgccggaagaaacattggcgaaattcagccggccggctgctgaaagcgaaaccctgctgaataggaaacatccgccggtctttcttgcggtggcaagcggaaaaggcggtgtcggcaaatcaacggtttccgtcaacctggccatttctcttgcgcggctcggaaaaaaagtcggcttgatcgatgcggatatatacggattcagcgtgccggacatgatgggtattacagttcgcccgacagtagaaggagaaaaactgcttcctgtcgaaagatttggagtaaaggttatgtcgatgggctttttcgtcgaagaaaacgctccggttgtgtggagagggccgatgctgggcaagatgctgaataacttcttccatgaagttgactggggagaggttgactatatcgttcttgatctgccgcccggcactggtgatgtggcgctcgatgtacacacgatgcttccgagctgcaaagagattatcgtatcaacgccgcaccctacagccgcatttgtagcggcgagagcgggttctatggcgattaagaccgatcatgaagttgtaggggtcattgaaaatatggcttactatgaaagtgcaaaaaccggcgagagagaatatgtgttcggtcaaggcgggggagataagcttgcagaggaattgcaagtgccgctgcttggcagaattcctttaaaacagcctgattgggacaaggatcagtttgcgccttctgtctatgacagaagtcatccgatcggggaaatttatatggggatcgcccagaaagtcattgaaaaaacagctgaataaaaaaggggccgggatcaacacggcccggccttttattggctttctttttcagagcttgaagctgcttttttcaattcatcctcgaattgctttttgaaaagcgggctggaaagtgtctctgtaattacatcttctaagtaactgcggaacttttggcttttcaccagctcatagtattttttatccatgccggggtcctgcatgatctgcataaaacttttctgataatcagggtctttcatcagtttttttatgattttttcatgctcgggctgaagagtttttgcaaagctctcggcgaattttgagtcttcaaaaatggttttccagaactccgccccttttttagaggtgagggttttctctattgtgcctttaatggcattttgatcaatcaccaatgcctcattcatcgcatcatcatttaatatttccttaattgccttttttccatcatcggtctttaatatatcaacaaccatttttttagtctggtcataatccatatccgctgcttggtcttttggagcacaagctgttacagataataaaacaaaacagcttatcaatagcgttttggcttttgacatgcataagctccttccttacttgtacttatttttaatatgattcatcggaatggatttatacataacaaaatatcgctgaacgcgattgtcagggggatgaataagagatgaaaagccgcgggcttgttcgatttttcttttcgattttagctgtgggcgctcttattacaagcgtcgtgggatttgctctgaagtggggggagtacaaggggttctttctgaattttgaggccggtcagattttctccgttctgatctggtttatcggggtgggcatgattttcagtgtgatcagccagatgggattcttcgtttttctgacggtgcaccggtttgcccttgaaattctcagatcaagctcgctttggaatctgcttcagctgtttatcattctgtttgtcgcttttgatttaatgtacgtcagatttttgtttttcggagagcgggatgactcgattgcggggtttgtctggctgccgctggctctgcttgccgtcggcctgttgacggcgtatataaaacaaaagcagtcctcaaaaaatacgttcgtttcatcattatttttaatggtcgttattacagcgcttgaatgggttcctgcgctacgagtgaataatgaggactggctttatttgatgctgattccgctgatgggctgcaatgcgtttcagctgttaatgctgccgaagtttgcccagaggtaattatttcacttctgatgacttgacgtcagtatttgcgatcaggtcgccgacggtcacgtttttcagtcctttttgctttaaattgtgaatgatggcggggagcgcttcttcagtctgtgttgctgaatcagatgcgtgcagcaggacaatgtcgccgccttttatatgactgtttacattttcaatgattttatcagggccgggatttgtccaatcctgcgagttaacgctgtaatgaaccactgaatagtggtactgctgtgcaatggtaagaacctttttattaaattgtccggtcggcgggcggagtaaatgaacattcttcacacccagctttttaaatgcggtctgggcccggaggatatctttttttatttcattgtcctctaggttggtataattcttatacgcatatcccatgctgccgatttgatgtccgtcttttaccatacgttcaactgtgtccgggtgccgttccgcccaagaagctgacagaaaaaaagtagcgtttttaataccgtttgcttttagcgcgttcagaatcggaaccgccttttcatcgccccagctgatatcgaatgttaatgcgacttcccccgctctcgtctccccttttgaaatagcctttgggccgctatcagttaaaaatacaggaagggggacggctctctgtatataaaaaaagctggctgctgcaaatgcggcaatgataataataagcagctgttttatccttctgatgtgccacacgtagaagtgattcactgatgacgcctccttatcttgtccatgcttgattacatcgtatgccgcggcggagatgaatataacgaaatacgttttaaaaaaaacgaaaaaaacacttgctaaatttaaagaatgcatggtatattattaaacgtcgctgatgaacagcagacaacaacaaaaagcttcggaaacaacgtaaaaaaagttgttgacataaaagaagctgagtggtaagataataaagctgcttcaacaagcggtaatgatctttgaaaactaaacaagacaaaacgtacctgttaattcaaagttttaaataaatcgcacagcgatgtgcgtagtcagtcaaactactttatcggagagtttgatcctggctcaggacgaacgctggcggcgtgcctaatacatgcaagtcgagcggacagatgggagcttgctccctgatgttagcggcggacgggtgagtaacacgtgggtaacctgc

SEQ ID NO: 13 - DNA, 55599 bp, Bacillus methylotrophicus
cctcaagatgagatttcccattccgcaaggaagtaagatccctgaaagatgatcaggttgataggtctgaggtggaagtgtggcgacacatggagctgacagatactaatcgatcgaggacttaaccaatttgaatgtatgcttactgttatctagttttgagagaacactctcaatggtttggtggcgatagcgaagaggtcacacccgttcccatgccgaacacggaagttaagctcttcagcgccgatggtagtcgggggtttccccctgtgagagtaggacgccgccaagctatattatgataaaggcagctcatcatgagctgccttgtttgtttttgaataaaaacaaaacaaacaccgaaatacggaaacgcccatatactaattgcaaacttcaaaaaggtccaaattgtgtatacaatcaacagcttaagggaaggctattcatacggaggtgggcaaaatgaatgaaacgtccagccatgaagagacatgtattgtgtgtgaaaccaaaaaaagcaggggaatccatatttatacgaaatttatatgtttagagtgtgagaagaaagtagtttccactccgacctctgatccaaattatgaatttttcgttcgtaaactgaaaagccttcatacaccgacgttatattcttaaccctgaaaagggtcttttttttgcctgaaatcagaggagtttttacactttttataaaagaactgatacgataagaagaggtacttgtttagacatggaatgtaatagataatactgataaaagtgaataaataggagtcgatcaagtatgaaaccgtttattcaatatatgaaatggacgttttgcggcagcacagtttttgtattagcggggataaccttctttacgatagggcatcagccttttctgtattcgcttttatacggggcagccagcggagccgcagccagtgcggccggtctgtggaatgcgaagcgtctctttttaaaaaaacaccggctgacaagaaaagaatatgcttatatcaaggaaaatcttgaggaagcaaagggtaaaatcatccgattacgcagggcgctttttcgctctaaaagtatacaaatgctgaagcagaatgcagagatactgcggataacccgacgaatatatctgctcacaaagcaggagccgaagcgtttttatcaggcagagcgtttctattatcaaacgcttgattctgttgtggaactgacggaaaagtatgctctgctctcctcacagccgcgaaaaaataaagatttatcaatgtccttgagtgagacgagaatgactctggcggagctttccagaaggctggaagaggatcttcatgaactgatgaaggaggacatcgacgacctgcactttgaattagatatggcaaagcattcactgagaaaataagaaaggaagaaggaaatggccaaagaccgttccgacgacagcatgggcgcccaaaatgaccagacccctctaaagcttgcagatacgctgccggaagaaaaaagagaagcggcacttcagctcgctgaaaaactggaccctgagaacatgcaaagcattgttctgtttggttcacaggcgcaggcgaatcttctggaattttcccatacgatgatagagcacgtgcaaagaaaagatgcaggagagatgggacaaatattggctgatctgatgatgaagcttgaccaggtaaaccctgatgatctgcagatgaagaacaaagggtttttcgcccggctgtttaaaagggtatccggttctgtgcaggaagtgctttcgaaatatcaaaagacaagtgtgcagattgaccgtatcagcagaagactggaatattctaaaaatgtgctgttgagtgacaataaattgttagatcagctgtacacccaaaataaacaatacttttctgatttaactatgtatatagtagcgggggaattaaaatcagatgagctgaaaacaaagctgatacctgaagcggcaagaaaagccgaattacaagaacacaatcaaatggccgcgcaggaagtgaacgatcttcgccagtttgccgaccgtctggataagagggtgcatgatctgctgctgagtaggcagattacgcttcagagtgcgccgcaaatccgcctgattcaaaacacgaatcaggcactggcagagaaaattcagtcctccgttgttacggctattcctttatggaagaatcaagtcgccatcgcgctgacgcttatgaggcagcggagtgcggcagatgtgcagcagaaggcggcggatacgacaaatcaattgctactgaaaaacgctgaacttctgaaaacaagtacagtcgagaccgcgaaagccaatgagcgcggacttgttgaggcggacaccctcaaaaaagtgcaggaaagcttagtcagcacacttgaagaaatcatgtctatccaagaagaaggcagggtgaaacgcaggcgtgccgaggaggagcttgttatcatggaaggcgatttaaaaaagaagctgcttgatatgaggtccggccgggataacggctagatggcaaaaagtcttagctttaagttggctcgcaggcacgatataataagaaagacaggaaaaggatttgtttaaaaatggacacacctttatatacagcgctgatgaagcatgcgcaccgaaatacgtattcttttcatgttccgggacatcacaatggagatgtcttttttgatgaagccaaatctgtatatcaatctcttttatctattgatatgactgagatcacgggtcttgatgacttgcatcacccgacgggggtcattaaggaagcgcaggatttggtgagcagattttacggctctcaggaaagtttctttctcgtcaatggaacgaccgccggcaatctggcgatgattttagctgtttgtgaaccgggtgaacccattctgatccagcgtaattgtcacaagtctgttttccatgcggcggcattggccggagccaagccggtttatttggcgccggaaatcgatgaaaacatgcatgtgccggcacatgtatccctttcagtcatcgaaaaagcgctggcgtcatatccgaacgcgaaaggacttgttctgaccaatccgacttactacgggcatgctgccgatttgactgcggcagttaacaaagcccattcatacggcgttcctgtactggtggatgaggctcatggggctcactttgtgttaggccagcctttcccgccttcatcattggctatgggggcagacgccgttgttcaatcggctcacaaaacgcttccggctatgacgatggggtcttactttcatttgaacagcaccagaattgacagagatcgattaacttattatgtaagcagtttgcaaagcagcagcccgtcatacccgattatggcatctttagatacggcgcgcgcttatgtgcaggatattgctgaaaaagggacacttcccgttcatatggagcgcattgagaaaatcaaacgaaggttcgcatcaatttcttctattgaaataatcgagccttccggatatgggctgcgggcggacccgttaaaattaattcttcggtcaaagctcggacattccggctattcattacaacggattttggagagtgaagacattgttgccgagctggctgacgagtaccaagtattgctcgtactgccgataggcggccggcggatgatagaacaggcaaccgtaagaaacatacagcagaaactggagaatacaccgcccgataaattgccggatgccgtgaattggacatttccgtccatttcgacaattgaatatccgcaaaatgagatgcggaagtttaaaaaagagcttacagatataaataaggctgccgggcgcttgcatgcggggaacattattccttatccgccgggaattccgctgatcatggacggagaacggataacagaagagattctacaaaagctttcccgtttaatcggcatggacgcgcatattcaaggcttgttaaacggggaacaattacttgtctatatagaagaggagaaatcatgagcggtttatttataacatttgaaggtcctgaaggtgcagggaaaacgactgtgcttcaggaaatgaaagagattctgtcggcagaggggctcccggtgacagcgacaagagaaccgggcggcatcgacattgcggaacagatcagagaagtgatcttaaataaaaacaatacactgatggatgccaaaacggaggcgctgctttacgctgcggcgagaagacagcatttagtcgaaaaggtgcagcctgcattgaaagaaggccgcattgtgctgtgcgatcgtttcatcgacagttcgctggcttaccaaggctatgcgagagggctcggcattgatgaagtcctttctatcaaccagtttgcaatcggcgatacgatgcctgatgtcaccatctatttttctattgagccggaagaagggttgaaacggattacgtcgaatgattcaagagagaagaatcgtctcgatcttgaggccctgcactttcatacgaaagtacgggaaggataccaaaaggtaatgcagcgttttccggaaagattccatacaatcgacgcatcgaaaaagaaggaactcgtcattcaggacgcacttcaagtgataaatgaagcattgaaaaaaattcagttgtgacctgtttctcataagttgctataatgaatgtaacgataatgttctttccaacctaaagggggcctagagaatgaaactaatagtggcagtggtgcaggatcaggacagcaacaggcttttgaaagtattaaccgaccacaacttcagggtgacgaagcttgcgacaacaggcggattccttaaatcaggcaatacgacgtttatgatcggggtggaagatatccgtgtcgataaagcgctcagcctcattaaagagaatggctgtaaacgtgatcagatgattgccccggtatccccgatgggcgggaatgcggattcctacgttccatatcccgtcgaagtggaagtcggcggagcgacggtctttgtcctcccggtcgatgaatttcatcaattttaaggatttgacgacgtgaaaataaattctgacttacgtacatttattgagaaaaagcagcagcctgcttataaagcggcagagctttccggaacatttaaaagttcaatggacagccaaagcagcaagctgaaatttgatcagctgagcaggttcttaacggatatagaaacgttcgggaaaaggctgacgaagtcgagaaacttcaaagacttagcgaaattcaaaggattggtaaaacgttttgtaaaagaggccgtagacagcgggttatcgcatgagacggagaaaagctttgacctgtacggaagcagccggactctggggcttgtgaaagaaatagatgaaaaactgcttcagctgacggaagaaatgttagatcaggaaaaaccggcaattgatttgctggatcgaatcggagaaataaaaggtttattgattaacctttacacatagagagtgatacaatggcaatatcatggaaggaaatgaccgggcagcagcccagagtgatgcggcttttgcataacagcattgaaaagaaaaggctttctcacgcatatctgtttgaaggcaaaaaaggaacgggcaaattggatgccgcactgcttctcgcaaaaagctttttttgccttgaagacgggactgagccttgcggggagtgccggaactgtaagcgtattgaatccggaaaccatcccgacctccatgtggttcagcccgacggattatccattaaaaaggctcagatccaatcgcttcaggaagagttttctaaaacaggactggaatcgcataaaaagctgtacattatatcccatgcggatcaaatgacgacaaatgcagcaaacagtctgctgaaatttttagaggagccgagtcaagacaccatcgcaattcttattactgagcagctccaccgaatactggataccatcgtttcgagatgtcaggttctcccgttccagccgcttcaaccgaaagccatagaagaaagactgattgaacaggaagtgagccctcacatggcccggctcttagcaaatatgacaaataatattgcggaagcagtcgaattaagtcgaaatgatgagtttgcagagtccagagcgaaagtgataaaattgtatgaagtcttacatcagcggaaaggacatgcctttttcttcattcaggatcagtgggtgccctttttcaaagaaaaaacccatcaagaaatgggtcttgatatgctcttattgatataccgtgatgtattatccatccaaattggaaatgaagataaactgatttatcaagacttattccaatcaataaaacagcatgcgctgcaatttacacaacaaagcgttacgaaccaaattctcgctgttttagaagcaaaaaaacggcttcattccaatgtgaatgtgcagggattaatggagcacttggtgttaacgttgcaggagggataagcttgtacaacgtaataggcgtccgctttaaaaaagcggggaaaatttattattttgatccgaacggatttgatatagaacaagacagctgcgtcattgttgaaaccgtaagaggtgtcgaatacgggcaggttgtcatcgcaaataaacaagtggacgagcatgatgttgtgcttccgcttcgaaaggtcatacgcgttgctgatgaacgcgatcttctcattgtagaagaaaacaaacaggaggccctgtccgcttttgaagtctgtcagaaaaaagtggctgaccacggcttagatatgaagctggttgatgttgagtttacatttgaccgcaataaagtcattttttactttacagcagacggacgggttgatttcagggaattggtcaaagacttggcttctatctttaaaacgagaatcgaattgcgccaaatcggggtgagggacgaggcgaaaatgctcggcggtatcggaccatgcgggagaatgctttgctgctccacgttcctcggtgattttgaaccggtgtccattaaaatggcgaaggatcaaaatttatcgttgaacccaacgaagatttccggtctgtgcggccgtttgatgtgctgtttgaagtacgaaaatgatgagtatgagacggcaaaagaacagctgccggatttaggcgaaatgattacgacggcaaacggccccgcaaaggttgtcggtcttaatattctggaacgggtgcttcaggtggaactgaagaatcgtgaaaaagtgatagaatatacttgggaagagctcttggaagagggcgtcgtatccgcacaaaccacagattaacgaggtgtggaaccttggataaaaaagagttatttgatactgtcataaacctggaggaacaaatcggttcgctgtaccgtcagctgggtgacttaaagcagcatatcggcgaaatgattgaagagaatcaccatcttcagcttgaaaataagcatttgcgtaagcggcttgatgatacgacagagcaaattgagaaattcaaagccgatcagaaagaaacaaaaacacagaaggcagagcagagtgatataggagaagggtacgacaatctggcccggctgtatcaagaaggctttcatatttgcaacgtccattatgggagcgtccgcaagggagattgccttttttgtctgtccttcttaaataaaaaataaggaaaaggcttccgctgatgtcggaagcctttttcaaagagtgccgaaaggaataagattatggtttcattacgtgatgatgaaagattggattacttattagcagaggatatgaaaatagtacagagtccgacggttttcgctttttcattagatgccgtgctgctgtctaagtttgcatacgttccgattcaaaaggggaacatcgttgatttatgcacggggaacggcattgtgccgcttttgctcagcacaaggtcaaaagctgatatcaccggggttgaaattcaggaacgcttgtatgatatggcgctccgaagcgtggaatacaacgggctgggcggtcagatcagtctcattcatgatgatctgaaaaatatgccggaaagactcggacataataaatatgatgttgtcacctgcaatccgccttattttaagacaccgaaagaggcggagcagaacctgaacgagcatctcagaatcgcaaggcacgaaatcctttgcacgcttgaagatgtgatttccgtcagcagcaaactgctgaagcaaggcggaaaagcggctatcgttcatcggccggggaggcttttggaaatctttgaattaatgaaagcgtaccgaatagaaccgaaacgggttcagtttatttatccgaaacaaggtaaagaagcgaataccattttggttgaaggaattaaaggcggccgccctgatctcaaaattcttcccccgctgttcgtatacaatgaacaaaatgaatatacgaaagagatccgcacgattttatatggagacaaatagtcatttcttttatgtgctgctgtgcaatgacaacagtctgtatgccggttatacaaatgatctgcaaaaacggctgaaaacccacaatgagggaaagggcgcgaagtacacaagggcgcgtaggccggtttcgttatgccatacggaatcatttgaaacaaaacgggaagcgatgcaggcggaataccgttttaagcagctgacccgaaagaaaaaagagcaatatatagaagaaaaacgacgcagcaaggaggctgtatatgttaagacgccagatgagttttaacggaaaatctgaaatgggaactctgtaccttgttcctacaccgatcggcaatttggaggacatgacctttcgtgcagtagagacgctgaaatcggccgatgtcatagctgccgaagatacgagacagacgaaaaagctgtgccatgtttatgacatagaaacatctctcatcagctatcatgaacataataaagaaagcagcggccataaaatcattgaatggctgaaaagcggaaagaatgtggcattggtcagtgatgccggcatgccgacaatttccgacccgggggctgagattgtgagagatttcacccaaatcggcggatatgtcgttccgctcccgggtgctaatgcggcattaaccgcgctgaccgcatcaggcatcaccccgcagccgtttttcttctacggatttttaaacagacagaaaaaagaaaagaagaaagaactcgaaatcctgaaaaaacggcaggaaacgatgatattttacgaagcgccgcacagattaaaagaaacattaatagcaatgcatgacgttttgggtaatcgaaccatcgccgtcacgagagaattaacgaaaaagtacgaggaattcatcagaggaaccatcgccgaggtgatggaatgggcaaatgaagatcaaatccgcggtgagttctgtctcgttgtcgaaggaaatcaaaccgctgaaccggatgaagaggaaaagccttggtggacggagctttctgagaaagagcatgtggagcattacataaacgaaggagcatcttccaaacaggccataaaacaaacagcggtagatcggggcgttccgaaacgcgagatttatgacgcttatcacattcaatcataaaaaaaaccgttcttgtatcgtaacaagaacggtttttgtatgaaatagcttatttttggttttgaagctggttttgaatttcagagatgatttgctcagcgccttctttgctgagtaccaatttgccgccggcaagtttaaggttatcatcagaaacttcaccagttacttggcaagtcatgtttggtttatattttttaaggatgattttttcatcatcaacataaatttcaagagcgtctttttctgcgatgcccagtgtacggcgaagttcgatagggataacgacgcgtccaagttcatcaactttacgtacgataccagtagatttcattaacagtctcctcccgagagataattattttgtagtttatatttttcttcgtcattattcgacaaaattccttacattcctagcataacaaggtttccaataatcgtcaatctttttgtttactattgattgtaagaattagttcttatagtaagtaaagccttggaaatcctgaaataacaggctttttgactgctttttcgaacctattatcctactgaaaatccttttaaatcaagactttcgaaccaagatgttttatattagtagattatatacgacaaatttcgacatgttaagactttttttaatttcaataaaaatttttaattttatttactcttttacgcgcagtacgtatatatccttgatcttaaaggctaagatggtatcatagatagaggacaaatatcaatattgtatatcaaataaaaccgctctcgtcctttgggcgtgagcttttcgacattctgaatgggaggttgcaacatgccgcaagacaataatactttttatattacaaccccgatatattatccgagcggaaaattacatatcggccatgcttatactaccgtggccggcgatgcgatggcgcgttacaaaagattaaaaggatttgacgtacgctacttaaccggaacggatgagcacggacagaaaatccagcagaaagcggaggaagagaatatcacgcctcaagcttatgtggatcgtgcagttgctgaaatccaaaaactatggaagcagctcgacatttctcacgatgatttcatccggacgacggaaagccggcacaaagaaattatcgagaaagtgtttcaaaaacttcttgataatggtgacatttacctggatgagtatgagggctggtacagcatacctgatgaaacattctatacggaaacacagctggtggatgtagaaagaaatgagaagggtgaggttgtcggcggaaaaagcccggacagcggccatccggtcgaattaatcaaagaggagtcatacttcttccgcatgagcaaatacgcagaccgcctgctgaagttttatgaggaaaatccttctttcatccagcctgaatcacgcaaaaatgaaatgattaacaacttcattaaaccggggcttgaagacttggccgtttccagaacgacgttcgactggggcgtaaaagtgccgggaaatccgaagcatgtcgtgtatgtatggattgacgcactgttcaactatataacagcgctcggttacgatacggaaaatgatgagctttacaaaaagtattggccggctgacgtccatcttgtcggtaaagaaattgtccgttttcataccatttactggccgattatgctgatggcgcttgatctcccgctgcctaagcaagtattcgcgcatggctggttattgatgaaagacggaaaaatgtcgaaatcaaaaggaaatgtcgttgatccggtaacgttaattgaacgctacggcttggatgagcttcgctattacctgcttcgcgaagtaccgttcggttcagacggtgtctttacgccggaaggtttcgtagaacggattaattatgacttggcgaacgacttaggaaaccttctgaatcgtacagtcgcgatgatccaaaaatattttgacggtgagattggttcatatgaaggaaatgtgaccgattttgattcagagctttcttctgtagccggtgaaacgattaaagcttatgaaaaggcaatggaaaacatggagttttcagtcgctttatcaacgctatggcaattaatcagccgtacgaacaaatatattgatgaaactgctccgtgggtgcttgctaaagatcaggaaaaagaaaaagaattacgttccgtcatgtatcatttagctgaatctttacgtatctcagccgtattgctccagcctttcttgacgcagacgcctgaaaaaatgtttgcccagctcggagttgaggatcagtctcttaaagcatgggacagcattcagacattcggccaattgaagaacgcgaaagtgaaaaaaggggaaccgcttttccctcgtcttgaagctgaagaggaagtagcttacatcaagcaaaaaatgcaaggaactgctcctgctaaagaagaaaaggcggaagagccgcaagaagcagagcgtcttcctgaaattacgtttgatcaatttatggatacagaacttcgcgtcgcagaagtcttgtccgcagagccggtgaaaaaagcagatcggctgctgaaattgcaaattgatctgggctttgaacagcgccaagttgtatcaggtatcgcgaagcattacacaccggatcagcttgtgggaatgaagatcatttgtgtaacgaatctaaaaccggtaaaactgagaggcgagctttctcaaggaatgatactggcaggagaatcggacggcgttctcaaagttgtagctgtcgaccagtcattaccgaaaggcactcgaattaaataatagatgcaaaaggtgtttcacgtgtaacattccgtcgaacaccttttgtttttcaacaagaaaggagtttttatgatgctttttgatacacatgcgcacttaaatgccgagcaatttgacacagacttagaggaagtcattgcgcgtgcaaaggctgaaaaagttgaacggatcgtcgttgtcggattcgacaaacccactatcacgcgtgcgatggagctgattgaggaatatgactttatatacgctgcgatcggctggcatccggtagacgcaattgacatgacagaggaagatttatcatggattaaggaactgtcctctcacgaaaaagttgtggcaatcggagagatgggccttgattaccactgggataaatcaccaaaagacattcagaaagaagtattccggaaacaaatcgctctcgccaaagaagtgaaccttccaattatcattcataatcgtgatgcaacggaagatgttgtcacgattttgaaagaagagggggcggaagaagtcggcggtattatgcactgctttacagggagcgcggaggttgcgcggcagtgtatcgatatgaatttttatatttcattcggcggaccggttaccttcaaaaatgcgaagaaaccaaaagaagtagcaaaggaaattccgaatgaccgtttgctgattgaaacggactgtcctttcctgacaccgcatcctttccgcggtaaacgaaatgagccaagctacgtaaaatatgttgctgaacagctcgctgaattaaaagggctgacatatgaagaaattgcctcaattacaaccgaaaacgcaaaaagacttttccgcatgaactgacagaatgcgctgtcgtaacgtgtaaaggcttgtccgattcagtggatatgtaaaacggttctacaagcttccttctcctcataagataggttgtcgatatgtctctcttcctttttttgctttgtttttgcataatgagggatacgctgaaggtttttcatcttcgagatgggagggttgacagcattttagatactctatataatctctccgaggagaaggaggcgtttttcatcacacaaaaaatgaaaaaactgttttccgtaaagcttggtaaaagcaaggttattcttattgcagctattattctgctgggcggaaccgggactgcatacggggcacatgagctctcaaaacaatcagtttctgtttctatcaacggcaagaaaaagcaaatacgcactcatgcaaaaacggttggggaacttctggaagatttacatatagagacgagaaatgaagaccggattaccccgtctaagcagacagcattggcagacaacatgaatgtcgtgtatgaagctgcaaagcagatccgtgtgacaagaggcggagaagaaaagactttatggtcaacggcaaaaacagtcggcgcatttctgaacgaacagcatacacctgtgaatcagcacgataaaatagatccagcagcagatacgaaagtgacaaacggcatgaaagtcacggtcgacccggcttttcaggtcactgtaaatgatgcgggaaagaaaaagaaaatatggacgacttcgactacggtcgctgactttttaacgcagcataagatggacatgaaagacgaagataaagtaaaaccggcattacacgaaaagctcacaaaaaatcaggccggcatacaaatcactcgtatcgaaaaagtcaccgatgtagttgaggaaaaaatagcgtatcaagtgaaagaaaaagaagatgcgtctctcgacagcgggaaagaaaagatcgttcaaaaaggaaaagaaggcaaacttaaaaagcattttcatgttgtcaaagaaaatggaaaagaagtttcaagaaagcttgttaaagaagaaacatctgaaaaaagcaaagatcaaatcattgcggtcggcacaaagcggcacagtcccaagattgagcagctcagtgcacctgtgaaggcatcttctggcgaaaccggatcttccggtaaagtgattaccgtgtcttccacggcttataccgcaagctgcagcggctgttccggccatacggctacaggcgttaacctgacaagcaatccgaatgctaaagtcattgcggtagacccaagcgtcattccgctcggcacaagagtccacgtagacggatacggggatgccgtggccgctgatacaggctcagccattaaaggaagacggattgatgtctttttccctgaaaaatcttcggcttaccgctggggaaagaaacaggtcaaaataaaaatcttaaattaattccgattcactcagagggttttgcgccctctgtttttttcgttataataggtaaagtgtattttcagtatattagacgtgacatgtaagcaaaggtttcgttttggatataaaaagtttttttggaggaagtaatgaaaattaaagaaattattgtagtcgagggacgcgatgacactgcgcgcataaaacttgccgttgatgcggatacgatcgagacaaacggttccgcaatcggagacgaagtcatcagacagattcggctggcgcaggaaacgagaggggtcatcgtgctgacggacccggattttccgggggaaaagatccggaaaaccatttctgaagcagtacccggctgtaaacacgcatttctgcccaaacatcttgccaaaccgaaaaacaagcgcggcattggcgttgagcacgcatccattgaaagcatcagagcatgtctggaaaatgtgcatgaagagatggaggcaaagccgagtgagatttcagctgaagatgtcatacaggccggtctgatcggcggaccggctgccaaaagacgccgcgaacgattgggcgacctgctgaagatcggctatacaaacggcaagcagcttcaaaaacggctgcaaatgtttcaaatcaaaagaagtgattttattgatgcgctcgatgctatgaggcaggaggaacaggatgaacaataaagatatcgcgacacctatcagaacgaaggaaattctgaaaaagtacggtttctcttttaaaaagagtctgggacagaatttcttaattgatacaaatatattggacagaattgtggaccatgcggaaattacggatcggaccggagtcattgaaatcgggcccggaatcggcgcgctgacagagcagcttgccaaacgggcgaaaaaggtcgtcgcgtttgaaattgatcagcgcctcctgcccattctcaatgatacgctgtctccatatgacaatgtaacgatcattcatcaagatgtgctgaaagcagacgtcaaatccgtcattgaagagcattttcaggattgtgatgaaattatggtgacggcgaatctcccatattatgtgacgacgccgatcatcatgaagctcttggaagaacatcttccgttaaaagggattgtcgtgatgctgcaaaaagaggtcgctgagcggatggccgctgatccttcttctaaggagtacggatcgctttccattgcggttcaattctatacggaggccaaaaccgtcatgaccgtcccgaaaacggtgtttgtgcctcagcctaatgttgattctgccgtcatccgtctcttgcttcgtgacggcccggcggttgacgtcgataatgaaccgtttttcttccagctgattaaagcaagcttcgcacagcgccggaaaaccttgcttaacaaccttgtgaacaatcttccgggcggaaaagagaaaaaagctcaaattgaagaagttcttcaagaaacgaatattgacggaaagcggcgcggtgaatccctgtccatagaagaattcgcgctcctgtccaacggattgcataaagcccttttctaagagggctttttgttttgcgtcaccacttggactgccgctacataggctagaggagaaccttattcattcaactgcaagaaaagcttgaaacatcaagcgccgcagcggaaagaggtgtatttgccaagacttctttcatgatgaggcttagtctatttgtggagtgggtaacgtgcaatttcaaataggagatatggtagccaggaaatcctatcaaatggatgttttatttcgcattatcggtatagagcaaacaagcaacggaaattcaattgccatcctgcatggtgacgaagtcagattgattgcggatgctgatttttctgatttggagcctgtcagaaaagacgaacaggccatgagaaagaaaagagatgaaagcaggatgaatgaatctctcgagctgctccgccaggattataagctgcttcgggaaaaacaggaatattatgcgacaaatcaatatcagcatcaggagcactactttcatatgcccggaaaggtattgcatctggacggcgatgaggcctatttgaaaaagtgcctgaacttttatgaaaaaatcggtgtgccggtatacggaattcattgccatgagaaaaaaatgccggcatcaattgacgagctgcttgataaatacaggccggatattttagtcatcaccggccatgatgcatattccaagcataagggaggcgtgaacgatttaagcgcctacaggcattccaaacactttgtcgaaaccgttcaaagagcgaggcgtaaagtccctcatttggatcagctggtcatattcgcgggggcctgccaatctcatttcgagtctttaatcagagcgggcgcgaatttcgcaagttcgccgtcacgcgtcaatattcatgcgcttgacccggtatatattgtcgcgaaaatcagcttcactccgtttatggagcggatcaatgtgtgggatgtcctgagaaatacgctgacgagagagaaagggctgggaggaattgaaacgaagggtgtgctgcgtgtcggtatgccgtataaatcaaatggatgagtgataaaacccgcatatatttcgctatgcgggttaattattttacaaattgatacataaatttccggaacttgtgaaaaataacgcagaaatcaatagaattttgtcaaaataattttgttgacaatgacttattaacgttgatataatttaaattttatttgacaaaattgggctcttgttgtacaataaatgtagtgaggtggatgcaatggcgaagacgttgtccgatataaaaagatcgcttgatgggaatttaggtaaacggcttacgttaaaagcaaacggcggccgccgaaaaacgattgagcgttcgggcattttagctgagacgtacccttctgtttttgtgatacaactagatcaagacgagaattcgtttgaaagagtttcatacagttatgctgatattctgactgagactgttgaattgacattcaatgacgatgcggcaagctcagtagcattttaatgggcagtgaaccttttgtttactgctttttgttttgccttctaaagctcttctaattattccctcgaaagtttcagccgattaaacggaagctataagtgtcacatgttttatcgtggcgtgcacgaatggtgatcaattctataaaaggggttgtttcgtttgggcagacgtcgtggagttatgtcagatgagttcaaatatgagctggcgaaggaccttggtttttacgatacggtgaaaaacgagggctggggaggcattcgggcgcgtgacgccgggaatatggtaaagcgcgcgattgagattgccgaacagcagatggcggctcagaaccaaaataaccgataatgcagtggcccgggggacaatccgttccccggttttttctatcggctgtcaaaaccggcttcaatttcggataagtacctccgggtctccaaatgtgatacaatgttcatacttatgtttagatggagaagtaggtgaaagctatgcgtattttagaaaaagcgccggccaaaatcaatctgtccctcgatgtgacgagtaaacgcccggatggttatcacgaagtggagatgatcatgacgacaattgatttggcagatcggattgaactgacagaactgcccgaaaacgttatcagagtggcgtcgcataatcgctttgttccggatgatcaaaggaatctggcttatcaggcagccaaactgcttaaagaacgatttcaagtcaaaaaaggcgtttccattatgattacaaaagtgatccctgtagcggcagggcttgccggcggaagcagcgatgcggcagccacgctcagagggctgaacaggctttgggatttaaagctttctgtcgaagagctcgcggagcttggagctgaaatcggttcagacgtgtccttctgtgtatacgggggcactgctctggcaaccggacgcggtgagaagatcaggcacatcagtgctccgcctcattgctgggtcgtgctcgccaaaccgacgatcggggtatcgactgccgaagtgtaccgccggctgaacttacagcaggttcggcatcccgatgtgcaggcgatgattgacgcgattgaagaaaaaagcttccaaaaggtatgcagacaattaggaaacgtattggagtcggttacgctcagcctccatcccgaggtggcgatgattaaaaatcaaatgaaacgcttcggcgctgatgcggtgttaatgagcggaagcggaccgactgtattcggtttggttcaatacgaatcgaaggtgcagcggatttataacgggttaagaggtttctgtgatcaagtgtacgcggtgcggatgatcggcgaacagaatgctcttgattaaatccgtatgttaagttatattatttttaaattattcggattttgggggtaagttcatgaagtttcgtcgcagcggcagattggtggacttaacaaattatttgttaacccatccgcatgaattaataccgttaacgtttttctcagaacggtatcaatcagcaaagtcatcaatcagtgaagatttaacgattattaaacagacctttgaacagcaaggcattgggacgctgcttacagtgccgggagctgccggaggcgtcaaatacattccgaaagtgaaacaggctgaagcagaagcgtttatacaggagctgggacagtctttagtaaatcctgagcgtatccttccgggcggttatgtatatttaacggatatcttaggaaaaccatctgtcctctctcatgtaggcaggctttttgcttccgtttttgcggagcgggagattgatgtggtgatgaccgttgcgacaaaaggaatccctcttgcttacgcagcggccagttatctgaacgttccggttgtcatcgtgcgaaaagacaataaagtgacggaaggctccacggtgagcatcaattatgtatcagggtcatctaaccgcattcaaacgatgtcgcttgcgaaaagaagtttggctacgggttcgaacgttttgattattgacgattttatgaaagccggcggcaccattaacggcatgatcagcctgcttgatgagtttaatgcaaacgttgcgggaataggcgtcttggttgaagccgagggagtgaacgaacggcttgtcgatgaatacatgtcactgctcacgctttcaaccatcaatatgaaagacaaaacgattgagattcaaaacggcaattttctgcgattttttaaagaacagcatttaaagaatggggagacagaaaaatgacaaaagcaatccatacaaaacacgcgccggcagcgatcgggccatattcacagggaatcatcgtaaacaacatgttttacagctcaggccagattcctcttactgctgaaggagaaatggtaaacggtgatatcacagaacaaacgcatcaggtgttcagcaatttaaaagctgtgctgaaagaagcgggcgcttctctcgagacggttgtcaaagcaacggtgtttattgctgatatggagcagtttgcggaagtgaatgaagtgtacggacaatactttgatgtacataagccggcaaggtcttgtgtggaagtggcgagactgccgaaagacgctctcgtggaaattgaagtcattgcgctggtgaaatcttaaatctcagaaaagtggttccggtctccgggatcactttttttatgcagtatatgatccccaaatatggtttatcacctaattgtgtatgtatatcctatattttcaaaaaaactttttgaaacgtgcaggaatttaaaaagaatcgtggaattgttagactaatgcttttatatagggaaaaggtggtgaactactgtggaagttactgacgtaagattacgccgcgtgaataccgatggtcgcatgagagcgattgcatccatcacgctggatcacgaatttgtcgtacatgatattcgtgtgattgatggaaacaatggtcttttcgttgcgatgccgagtaaacgcacccctgatggagaattccgcgatattgctcatcctattaattccagcacgcggggcaagatccaggatgctgttttaaatgagtatcatcgtttgggtgattctgaagcattagaatatgaagaagccggggcttcttaaacataacaaaatgtaaggactgctgataaaggctgacacaaggccttttccggcagtccttttttaaatctgatttttcagtaataaagcgattacatagaaaattcttgcactttttgatgtcttcttgaaatcaacagctatttaggatatatttttctatggataaaagggatattggaggccattaaatggataagcggtttgcagtgattttagctgccggaaaaggaacgagaatgaaatcgaagctttacaaggtccttcatccggtatgcggaaagcctatggtagagcacgtcgcagacgaagctctgaaattatctttagcgaagcttgtcaccatcgtaggacacggcgccgaagatgtgaagaagcagctcggacagaaaagcgattacgctctccaagcagaacagctcggtacggctcatgcggtcaaacaggcaaaaccatttcttcacggagaaaagggtgtcacgatcgttatttgcggcgatacaccgcttctgacggcggagacgatggaagccatgctgaatgaacatacagacaaaggtgcaaaagccacggtgttaacggccgttgccgacgatcccgccggatacggaagaatcatccgcagtgaagacggcgccgttcaaaaaatcgtggagcacaaggatgcttcggagcaagaacgtcttgtgaaagaaattaacacgggaacgtactgttttgataacgaggctctttttcgtgtcatcgaacaggtttcgaatgaaaatgcccaaggcgagtattatctgccggatgtgatcgaaatcctcaaagacgaaggcgaaactgttgccgcttaccagactggtaacttccaagagacgctcggagtgaatgatagagtcgctctttctcaggctgaaatgtatatgaaagagcgtattaacaaacggcatatgcagaacggagtcactttaatcgatccgatgaatacgtacatctcacctgacgcacgtatcggacaagatacagttatttatcccggaactgtgttaaagggacaagctgaaatcggcgatgaatgtgtcatcggcccccacactgagatagaggacagctcaatcggcagccgcactgtgattaaacaatccgttgtcaatcgcagcaaagttgggaatgatgtaaatatcggtccttttgctcacatcagacccgattccgcaatcggcaatgaagtgaagatcggaaactttgttgaaatcaagaaaacacaattcggcgaccgaagcaaagcatctcatttaagctatatcggtgatgccgaagtgggcacggatgtgaatctgggctgcggctccatcacggtcaattatgatgggaagaaaaagtatttaaccaaaattgaagacggcgcctttattggctgcaactccaatctggtcgctcctgttacagtgggagaaggcgcgtacgtcgctgcgggttcaaccgtaactgaagatgtgccgggcgaagcgcttgccattgccagagcaagacaagtaaataaagaagattatgtgaaaaacattcataaaaaataatcctaaaatcggaggtttaccatgtctaacgaatacggagataagaatttaaagattttttctttgaattcaaatccagaacttgcaaaagaaatcgcggataatgtaggggttcaattaggaaagtgctctgttacaagattcagtgacggagaggtccagatcaacatagaagaaagtattcgcggctgtgattgctatatcattcagtctacaagtgcgccggtcaacgagcacatcatggaattgctgattatggttgacgctttaaagcgcgcttccgcgaaaacaatcaacattgtcattccgtactacggttatgcgcgccaggacagaaaagcaagatcacgtgaaccgattacggcaaaactttttgcaaacctgcttgaaacagcgggtgcgacacgcgtgatcgcgcttgatttacacgcgccgcaaattcaaggtttctttgatattccgattgaccacttaatgggtgttccgattttaggccattactttgaaggtaaagacttgaaagatatcgttattgtttctcctgaccacggcggtgtgacgcgcgcccgcaaacttgcggaccgtctgaaagcgccgatcgcgattatcgacaaacgccgtcctagaccgaatgaggtagaagtgatgaacatcgtcggtaacgtggaaggtaaaacagcgattctgatcgatgatattattgatacggccggcacaatcacacttgccgctaacgcgctggttgaaaatggagctgcagaagtgtatgcatgctgtacgcaccctgtactgtcaggccctgccgttgagcggatcaataactctaaaatcaaggagcttgtcgtaacgaacagcattaagcttcctgatgagaaaaaaatcgaacgctttaagcagctttctgtcggaccgcttctggctgaagcgattatccgcgttcacgagaaacaatctgtcagctatttattcagctaaaccgaaactttaaggtttaaatcccagttattgtgggtattgttctaataggacgataaaacgataattaggatggtgctgaatatggcaactttaaaagcaaatgaaagaacagattttaaacgttcgacgcttcggaaaatccgtcattcaggacatgttccagggattatatacggtaaagaaataacgaacacgcctgtctctttagacagtgttgaattgcttaaaacattgcgggacgaaggaaaaaacacgattatcacaattgatgtcaacggaaatcagcaatcggttatggtgactgatcttcagacagacccgctcaaaaacgaattgacgcacgccgattttcaagtcgtgaatatgagtgaggagctggaggccgaggtgccgattcagctgacgggagaggcgaagggagtcaaagacggaggcgtcatccagcagccgctgcatgagctttcgatcaaggctaagccgaaggacatccctcagacaatcaatgttgatatttccgggcttgaaatgaatgatgtgctgaccatcgcagatctgactgctgacggcaattatacatttacaaacgacccggaagaagtcgtggcttccatccttcctcctaagcaggaagcattcgaagaagatgcagaaccgtctcctggggaagagcccgaaggagaaaatcaataagcgctttaagacgtaacccgcccgaggttacgtcttttgtgctagaatgagaagaattacagcgatgttgagggaggatttacgatgcttgtgattgccggtctcggtaaccccgggaaaacctatgagaacacgagacataatgtcggctttatggccattgacgagctttctaaagaatggaatattgaattgaataaaacgaaattcaacggactttacggaatcggttttgtttccggaaaaaaagttctacttgttaaaccgcttacatatatgaatttatcaggggaatgtttgcggccgctactggattattatgatgccgatcatgaagatctgaaagtcatatacgatgaccttgatcttccgacgggaaaaatcaggctccggacgaaggggagcgcaggcggacataacggaattaaatcgcttatacagcacctcggaacccctgaatttgaccgggtcagaatcggaatcggccgccccgtcaacggaatgaaagtcgttgactatgtactgggagcttttacgaaggaagaagcgccgcatatcaatgatgccgtctcaaaaaccgtaaaagcctgcgaagcttccttaacgaaaccatttttagaagtcatgaacgaatttaatgcaaatgtataagataaataatgggagaccatactagggaaaaatgattttttcacatcaggaggtccaacgtatggctttgcattatttctgccgccactgcggctttaaggtagggagcctggaatattcgacggtgccgacacagtcacttggatttcagcacttaacaaatgaggaaagaaacgatatgatttcatataaagacaatggagatgtccatgttcttacaatttgtgaagactgccaagaggcgctggaacgcaatccgcactaccatgaacacaacacatttattcaataagaagctttggtgtagattctagaccaaagcgtttttctgttcttgcagaaaatagagaggagggcccatatggacaacattcaaacctttattaaagaaagcgatgattttaaatccattgtcaacggtttacatgaggggctgaaggaacagctgcttgcgggtctgtcaggttccgcgcgttctgtttttacctccgcccttgcacaggaaacgaaaaggccgattttctttatcacccataatttatatcaggcccaaaaagtgacggaagatctgacagcgcttctcggggatcaatctgtttttttataccccgtgaatgaattgatttcttcagaaattgcggtagcgagccctgaactgcgtgctcagcggcttgatgtcattaatagattaacaaacggagaagcgccggtcgttgtggcgcccgttgcggcagtgagaagaatgcttccgccgaaggagctgtggaaaagcagccagctcgtcatttcactcggagacgaaatagaaccggatcagctgtccgcgcgccttgtagaggtggggtatgagcgttccgatatggtttctgcacccggtgaattcagtattcgcggcggaattatcgacatttatccgctgacgtcggagcatccggtgcgaattgaactgtttgatacggaggtcgattccatcaggagcttcaattctgatgaccagagatcaattgagacgctcaaacatgtggcgatcggaccggcgaaggaattgatcatcagggcggaagaaaaagtccgggcgttggaaaggctcgataaagagcttgccgacagtctgaaaaagctgaagcaggacaaacaaaaggaaatgcttcatatcaatatctcacatgataaagaacggttatcaacgggacagactgatcaggaacttgtgaagtatctctcgtacttttacgaaaaacctgctagtttgctagattatacaccggcagacacgttgttactgttagacgaggtcagccgcattcatgaaatggaggatcagctgcaaaaagaagaggccgaatttatgacaagtctgctcgaggaagggaaaattctgcatgacattcatttatccttcagctttcaggagcttatgagcgaaaagcggcgcccagctatttattattcattatttttgcgtcatgtccagcatacaagccctcagaatatcgtgaatgtgacaagccggcagatgcagagttttcacgggcagatgaatgtgctcgcaggtgaaatggagcgctttaagaaatcaaacttcaccgttgtctttttaggcgcaaataaggacagaaccgacagattggcatccgtgctggctgattacgaaattgaagccgcaaaaacggacagctccaaagcgcttgtgcaaggacaggtctatgtcatggaaggcgagctgcaatccggttttgaactgccgctgatgaagctggccgtcattacggaggaagagctgttcaaaaaccgaatcaagaaaaagccgagaaagcagaagctgacaaatgccgaacggatcaaaagctattccgagcttcaggtcggtgactatgtcgtccacgtcaaccacgggatcggtaagtatttggggatcgaaacactagaaatcaaaggcattcataaagattacctcaacattcattatcagggcagcgataagctgtacgtccctgtagaacaaatcgaccaggtgcagaagtacgtcggctctgaaggaaaagaaccgaagctttataaactgggcggcagtgaatggaaacgggtgaagaaaaaagttgaaaactccgttcaggatattgccgatgatctgattaagctttatgcggaacgggaagcaagcaagggctatgcgttctcgccggatcatgaaatgcagcggcagttcgaatctgctttcccttatcaggaaacagaggaccagctccgttccattcaggagattaaaaaggatatggaaagagagcgcccgatggaccgtttgctttgcggtgatgtgggttacgggaagacggaggtagccatccgggcggcctttaaagcgatcgcagacggaaagcaggtcgcgcttcttgtgccgacgacaatactcgcgcagcagcattatgaaaccattatggagcgtttccaggactatccgattaacatcggtcttctcagccgattcagaacgagaaaagaatccaatgaaacgattaaaggcctgaaaaacggaacggtagacatcgtaatcggaacccacaggctcttatctaaagacgtcgtctataaagatctcggcttgctcatcattgatgaagagcagcgctttggcgtaacgcataaggaaaaaatcaaacagatcaaagccaatgtcgatgtgctgactcttacagcgacgccgataccgcgcacgcttcatatgtccatgctcggtgtgcgggacttatctgttattgaaacgccgccggaaaaccgtttccctgttcagacatatgtcgtggaatacaacggcgcgcttgtgcgggaagccatcgaaagagaactggcgcgcggaggacaggtatatttcttgtacaaccgcgtggatgacatcgagcggaaggctgatgaaatttccatgcttgttcccgatgcgaaagtggcatatgcccacggaaaaatgaccgaaaatgaattggaaagcgtcatgctcaattttctggaaggggaatcagacgtccttgtcagcacgactattattgagacaggcgtagatataccaaatgtcaataccttgattgtgttcgacggagacaaaatggggctgtctcagctgtatcagctgagaggacgggtcggccgttccaaccgcgtcgcttatgcgtattttacgtaccgcagagacaaagtgctcactgaggtggcggaaaaacggctgcaggcgattaaagaatttaccgagctgggatcaggctttaaaatcgccatgcgtgacttgacgatcaggggagcggggaaccttctcggcgcccagcagcacggctttatcgactcagtcggttttgacctgtactcgcaaatgctcaaggaagcgattgaagagcggaaaggcgatattccgaaaagcgaacagtttgagacagaaatcgatatcgagcttgacgcgtatattcctgaaaactatatacaagacggcaagcaaaaaatcgacatgtacaaacggttcaggtcaatcgccacaattgaggagaaaaatgagcttcaagatgaaatcatcgacaggttcggcagctaccctaaagaggttgaatggctgtttacggttgctgagatgaaggtatacggaaaatatgaacgcgtcgaactcatcaagcaggataaagacgcgatcagatttaccatttctgaagaggccagcgcacagattgacggccagaaattgttcgaactcggcaataaatacggccggcagatcggactgggaatggaagggaaaaagctgaaaatctcagtacagacgaaaggccgcaaaacggaagagtggctggagaccgtgctcggcatgctgaaaggccttcaggatgtgaagaaagaaacaatcgcgtcttcataaaaattgttactctctggtgtatattacatttgatgtgacggatactaatttcaagcgagtggcggaagctacataaagtaaagagctttagtactttcccttaaatatcatcacatgaaagagaggcaccagagagatgaaagctacaggtatcgtacgtcgtattgatgatctaggacgggtcgtcattcctaaagaaattcggagaacactgcgaatcagggaaggagacccgcttgaaatattcgttgaccgcgacggagaagttatattgaaaaagtattctcctatcagtgagcttggcgattttgcgaaggaatatgcagatgctttgtatgacagtctcggccattccgtcttgatttgcgaccgtgacgcgtatattgccgtttcaggcagttcgaaaaaagaatttctgaacaaagccatcagcgatttgctcgaaaaaacgatggatcagcgcagctcagtggtagaaaacgacgtgaagtccgcgcagcttgttaatgacattgatgaagatatgagctcctatacaatagctccgatcgtggcaaatggcgatcctatcggtgccgtggtcatcttttccaaggaacaggcacttggagaagtagaacataaagcggtagaaacggcagccagttttttggcgagacaaatggagcagtaggtcttattaccattattgaaataagaaaacggagaaagagcagctcttatacaagtgctgttctttttcatattcatatgtgctctctatcggttcggccgttaggattgtgatataataagctcgttttatagacgtaattttctagcggctggaaggagcttttggatgaacgattcagttggcgccaagcggcaatcggcatggaaaggtgcttttgtgctcgtcgttgcgggtatcgtgacgaagatattaagcgccgtgtacagggttccttttcagaatattgtcggtgacgtcggattttacatttatcagcaggtgtatccgtttttagggatcgcggtcatgctgtcaacatccggttttccggttatcatctcaaaattaatgaacgattatagcgatcataaacaaaaaataatgaaaatttccgccctttatgtcacggcggccggacttgttctgtttgcgctcatgtatgtcggcgcggcgccgttggccggttttatgggtgacgcccgccttgtgatgctgataagggtcgcggcgttcgctttcatactgtttccgtttacggcggttttccgggggtatttccaaggcgtgcatgatatgatgccgtcagccttatcccagattacggaacagcttcttcgcgtggcggtgcttctcggtttatccttctggcttttgaaaagcggccgttcattatacgccgctggtgcgggggcggcctcgggatcaattgccggaagcttggcagccctttgtgtattggctgttttctggtataagcgggaagaaaccaagaaagacggcggacatatcgcaacggccgtcattgtaaaaaagctgctgctttattcagtcaccatctgtatcagcagtgtactcatgcttttgattcagcttgtagacgccttaaacttatattcactgctttcagacgggacggagagccatgccgcgaaacagctgaaaggcatatatgaccgcggacagccgctccttcagctgggaaccgtgtttgccgtcagtatcgccgcgtcattggttccttcaatttcaaaagcggtgcatgagaataagccgtttatcataaaagagaaagcgacatcagccgtcaagctctgccttgcggtagggatcggtgcatcagccgggcttttttgcattttagagccggtgaatatcatgcttttccaaaacagtgaggggacgcagaccttacaaatattcagcttatctatcttttttgcctcgattgcgcttacagcagccgcgattctgcaaggagcgggacataccgttttccccgccgtatccgttttggcgggaggggcgctgaaatgggtgctgaatgtttggctggtccccggctggggtattacaggagcggcactggcgaccgtcttggcatttgccgcagttgcgtgcctgaatctccggagaatttggtcgaagggctggctgacgaatatcggcggcgtgattgcccgtctgtgctggtgcagtctgctgatggtcttctttctgctcgtatatatgaagctatggcagttatttgttcccgtcagcagggccggagctgtatgtgagagtctgtctgcgtcagtcatcggagggctattgtttatttattgtatgataagaatgaagattttcacggacgaagagctgagcggccttcctttcggcagtgctttaagcaaattgaaaaagaggagagaaaaacatggcaggtaacattacggtcgtcggcctcggcgccggagacatggatcagttgacagtgggcgtacataagctgctgactcaggcgaagcatttatatataaggacgaaagaccaccctttgattccggaattagagcaagagacggaagcggacatccggtactttgatgatatttatgaaaaacatgatcagtttgaagcggtctatgaagagatcgcggacattctgtttgaaaaagcgaagcaagaggatgtcgtctacgctgtgcccgggcatccgtttgtcgctgagaaaaccgttcagctgttatttgaacgccgggaagaacaacaggtagctgttcatactgccggagggcaaagctttttggatgccacttttaatgcattgcgaattgatccgattgaagggtttcaatttacggatgcgcaaacaatgacgccggatgagctcgaactccgccatcacctgatcatttgccaggtttatgaccaaatgacggcctctgaggtcaagctgacgcttatggagaaattgcctgacgactatgaagtggtcatcgtcacggcagccggaagcaagggagaaaagatgaccaaggtgcctttgtttgagcttgaccgcaatgtagaaataaataacttaacaagcgtgtatgttccgccgattaaaaaagaagaactcctttaccaggaattttctgcattccgaagtattattcgcgagcttcgcgggccgaacggctgtccgtgggatcaaaagcagacacaccagtcattaaagaaatatatgattgaggaatgctacgaactgcttgaggccattgacgaagaggacacggatcacatgatagaagaactcggggacgtcatgcttcaggttatgctgcacgcccagatcggagaagacgaggggtatttctcaattgatgatgtcatcagagacatcagtgcgaagatggtcagacggcacccgcatgtgtttaaggatgttaaggttcaggatgaacatgatgtcgtcgccaactgggaagaaatcaaaaaggcggaaaagcaaacaacatcctcttcattgctggatgccgtgccgaaaacactgccttctcttgcaaaagcggccaagcttcagaaaaaagccgcaaaaaccggctttgactgggatgacgttcaggatatatgggataaagtaaatgaagagctgaaggaattttctgcagaggcttccgccgaatcagcagatgaaatcagcttaaaagctgaattcggcgatgttttatttgcattggtcaatatcggccgatactataaaattgagcctgaggaagcgctcgccatgacaaatgacaaattccgcagacgctttgcttatattgagaaagaagcggcggcaaagggacttgaattgaccgcaatgtcacttgaggaaatggacaaattgtgggatgaagcaaaagaaatggagaggagattctgatatgagacttgataagtttttaaaagtatccagattaattaaacgccgcacattggcgaaagaggtcgccgatcaagggagaatcaccgttaacgggaatcaggcgaaagccagctcagacgtaaaagccggtgatgaactgacggtccgcttcggccagaaacttgtcaccgtgaaggtaaacgaattgaaagaaacaacgaaaaaagaagaagccgcgggcatgtatacaatcgtcaaggaagaaaaactcggcgaataggcttgttctaaacaaggctcccgtctcatacaatgcagtaataatgctaaaagtatcgaggatatgggggctgaatagatgaattcatattatgagcaaaaaggttcttcttctgttccggaacagcatgatgtaacgatgaaagggagaaagcatttagacatttcgggcgtcaagcatgtagaaagttttgacaacgaagagtttttgctggaaacggttatgggaatgctttccgtcagaggcgagaacctgcagatgaaaaatcttgatgtggaaaaagggattgtatctataaaaggcagggtgtttgaccttgtatatttagacgagcagcaaggggataaagctaaagggttttttagcaagttgtttaaatgacgctgaccacccaattttatacgatgctggcaatgaccggtatgggcgcctggctcggagcgtcgcttgatacatacaggctgtttgtcagccgcgccaaaacggccagatggctgttattcattcatgacattctcttttggattgtacaaggtctgctgtttttctatgtgctgctcaacgtgaatgaaggggaactcagggtatacattttcttggctgtcttactggggattgcgacgtaccaaagcctgtttaaacgaatgtatataaaaatactgaaatttgccattcatcttgcggtgtctctttaccaattcgcaaaaaagctcattcagcacgtgctgttccgtccggtgcttctgctctttaagctgctcatcgggctgatcacggttatttctttatactcctatcgggtgagtgccttttttgcgaagtgtctttttaagatcgtaacgtttttgctgtatccgctgtttttcctgttgaaacaattattgaaacttcttcctgaaaagtggcgtcttactttcaaacgatattttcaaaaaagtgcaggatttttacaaaagagcaagaaactaatcataacaatcagatcgaccatgatacgtattttgaaaaggtgaaaggaggaccgtctggtttgaatctatctagagaacgtacaataactgaaatccaaaacgactataaagagcaggttgaacggcaatcccagcttatgaaaagaaggcggaaagggcttttcagacggttgatcgtattcggcgcccttgtgttgttgacggctattgtcttagcgggttctctgtggtcacagacctcttcccttagcgcaaacgaagaaaagaaagctcagctggaaaaacaagtgaaagaattgaacgcgaaacaggctgatttaaaagatgaaatttccaaattaaaggatgaggattacgtcacagagcttgccagaagagacttgtttatgtcaggaaatggtgagattctcttcaatgtagaaaagaagagcaagtagccttgttgacacttaaatttttatttaggtataattaaacaaacgatctttttataagcctaaggaggagcactttttttatgtcgattgaagttggcagcaagttgcaagggaaaataacaggtattacaaatttcggagcatttgttgaattgcctggaggctcaaccggtctcgttcatatcagtgaggtagccgataattatgttaaagacattaacgagcatttaaaagtcggcgatcaagttgaagtgaaagtcatcaacgttgaaaaagacgggaaaattggtttatcaattaaaaaagctaaagaccgtccgcaagccagacctagaaatgatttccgtccgaaagaatcttttgaacagaaaatgaacaagtttcttaaagatagcgaagaccgcttatcatctttaaaacgaaacacggaatcaaaacgtggagggcgcggagcaagaagaggataacttgctgctttctataaatacatggagcatccgtctatcccagcgggtgctttttttgtattcacccatatagtcagaaaattaaaactttaaagtatctgttgacggaatgaagaaacctttgtattatataacttgtgcttataagcacctatatggcggtgtagctcagctggctagagcgtacggttcatacccgtgaggtcgggggttcgatcccctccgccgctaccatatatatggcccgttggtcaagcggttaagacaccgccctttcacggcggtaacacgggttcgaatcccgtacgggtcatcaagcgaatcggcttctgttgcagaagccgattttttcatatttagacaactttttgagaaatgtcggaggaaatacgaaaggaaaggggaacaagggagaaagcgtcgaagagttctttggaattgttaccttcttttgacaaaatcctatctgggctttcatttataatgacaagcaacgaataaaacaggtgggggatgagagcaatggaaaaagcggaaagaagagtgaacgggccgatggcgggacaagctctggaaaaactgcaatcgttttttgaaaaggcggcaaagcttacagtccatcaagcgcattcactttttttctataagggtttcatttatgtcgtgatcggttttttacttggacgggctttcatattatctgaggttcttccgtttgcgctgccgtttttcggagcgatgcttttgatcagaagagataaagccttctatgcttgtctgtctttacttgcgggcgctttaaccatttcgccgaaacactctttattgattctcacagctttggccgtcttcactctattttcaaaaatcggtacatatatcgtgcaggaccgggtgaagatgctgccgatcgtggtgtttttctctatggctgccgcgagaatcggatttgtttattttgaaagcggcgcttttaccacctatgattatgtgatggctgttgtcgaggcgggcctggcctttattttgacgctgatctttttgcaaagcctgccgatcttcacgatcaaaaaagtgaagcaatcgttaaaaatagaagaaatcatctgttttatgatcttgatcgcatccgttttaaccgggcttgccggtgtttcatttcagggaatgcaggctgaacatatcctggcccgctatgtcgtgctgagtttttcctttgtcggcggggcaagcatcggctgtacggtcggtgttgtgaccggactgatcctcgggcttgcgaatatcgggaacctctatcaaatgagtctgcttgcgttttccgggcttcttggcgggctgctgaaagaaggaaagaaagccggagccgcagtcggattagtgatcggctcactgctgatttcattatatggagaagggtctgccggattaatgaccactctttatgaatctttgattgccgttgttttgtttttgattacgcctcaatcgattacgaaaaaggtggcgcgatacataccgggcactgctgagcacagtcaggaacagcagcagtacgcgaggaaaatcagagatgtcaccgcccagaaagtagaccagttctccaatgtgtttcatgccttgtcggagagcttcgccacctttcatcagacgtcttccgatgagcaggcggaagaaggggaagtggatctctttttaagcaaaatcacggagcattcgtgccaatcctgctataagaaaagcaaatgctgggttcaaaactttgataaaacatatgacttaatgaaacaagttatgcatgaaacagaagaaaaacagtatgcctcaaaccgcagattaaaaaaggagtttcaacagcactgttccaaatccagacaggtggaagagctgattgaggacgaacttgcccaccatcacgcccatctgacactgaagagaaaagttcaggacagcagaaggcttgttgccgagcagctgttgggggtttctgaggtcatggcggacttttctcgggaaataaaacgggagagggagcagcattttattcaggaagaacaaatgatagaggcgcttcagcatttcggaatcgagattcagcatgtcgagatatacagcttggagcagggcaatattgatatcgaaatgacaatcccgttcagcggaggacacggcgagagtgagaaaattatcgccccgatgctgtctgacattcttgaggagcagatacttgtcaaaagcgaacagcactcgactcatccgaatggctacagccatgttgcgttcggttcgaccaagtcttaccgggtatcgacaggcgcggctcatgcggcaaaaggcggcggccttgtctccggcgacagctacagcatgatggaactgggggcgagaaaatatgcggccgcgatcagtgacggcatgggcaatggggcgagggcccattatgagagcaatgaaacgattaagctgctcgaaaaaattctcgaatcaggtattgatgaaaaaatagcgataaaaacgatcaacagtattctgtctttacggacgacagacgaaatctactcaactctcgatctttctatcattgatcttcaggatgcaagctgcaaattcttgaaggtcggttcaacgccgagttttatcaagcggggagatcaagtcatgaaagtgcaggccagcaatctgccgatcggcatcatcaatgaatttgatgtggaggttgtaagtgaacagttaaaagcgggagatctgctcgtcatgatgagtgacggtatttttgaagggccgaagcacgttgaaaaccacgacctgtggatgaaacggaaaatgaaagggctgaaaaccgaagacccgcaagaaatcgctgatatattaatggaagaggtcatcagaacgcgttccggccaaatcgaagacgatatgacagtggttgttgtccggattgaccacaacacgccgaaatgggcttccataccggtgccggcggttttccaaaataaaaaggagatttcttaatcatttcgtataaatcactttccttctggcgaagatgggactaatcgtatcaccgggaggaatgtatgtgaataagggacatttaaatcaagttctgctgattacagatggctgctccaatcatggtgaagacccgatcgcaatggcggctttcgccaaggagcaggggattacggtgaatgttataggaattatggaagaaaacgcgattgaccaagaggcaatgaaggaagttgaaggcatcgccatggccggaggcggcgtccatcaagttgtgtatgcgtcacaattgtctcagacggttcaaatggtgacgaaaaaagcaatgacccagacgctgcaaggtgtcgtcaatcaagagcttaaacaaatcttagggaaaaacgttgaaatggaagagctttctcctgaaaaacgcggcgaagtgatggaagtggtagatgaactcggcgaaacggttcatctgcaagtgcttgtgctggttgatacgagtgcgagtatggcgccgaaactgccgacggtgaaagaagcgctgatcgatctttccatcagtttaaattcccgggccgggcaaaatgaatttgcaatgtgtatatttcccgggaaaagccaggaagttgagcttgtgctgaattggacgccgaagcttgaatccctttctgcactctttgcgaagctgtcgaccggcggtatcacccctacgggccccgctatccgggaagcgacgcagcagtttgagagaatccgctcaagaaggagcatgttggctgatgatgaacgacgctttaacgagtttggcatgtagtctggcaccggggacggcaattcagggcaaatggaacggcaaatcctacagattgctcaaacagcttggaaaaggggctaacggtattgtatatctggcagaagcatcaggcggacaggtcgctttgaaaataagcagcgacagcatgtctgttacctctgaagtgaatgtcttaaaatccttttcaaaggcccggtcgcaaacgatggggccttctttttttgatgcggacgacgcgtttattccgcagctgaataaaaatgtctctttttacgtgatggagtacatagaagggccgcttcttccgcaatatatcagcagtaagggagcggagtggattccggtgctgatggtgcagcttctttccagcttgtcagtccttcatcagcaagggtgggtttttggcgacctcaaaccggacaatctcattgtaaccggaccaccggctgccattcgctgcattgatgtagggggaacgacaaaacagggccgcgcgattaaagagtatacggagttttacgacaggggctattgggggtatggaacaagaaaagcagaaccatcctatgacctgtttgctgtcgcaatgatcatgatccactgtgtccagaagaaagagtgcaaaaagtcaggacagccgaaagaacagcttcgttctatcattgaaggccacccgtttctgaataagtataagaaggttctgttttctgctttaaacggccaatatccgtctgcggaagccatgaagcatgacatcctgacggcggggcagagtgcagggagtaaaaggaaagccgccgccaagcctaagccgccgcaatcaaaaccgcggcagggcactgtatctcaaacgcggtataaacctaaacaaaaacccgcaaagcacaatggtttgtttgaaacaacacttattttaatcagcgttctcgccctttatttcgcttacatcgtcttttttctcatctagtgccggccggacgcctgcgctcatgcttcttctttgcttggagggaatgaaagtgataggatatgtatatctttaaaaaacctgctcattgtgagggggacattgtgaaaagcgtggaagattttttcaaaacatatcgtcttcaggcggagggagaaacgattattgccggggtctccggaggccctgattcaatggcgcttctcagtatgctgaataagcacttcgggcattcttccgttatcatagcggcgcatgtcgaccatcagttcaggggtcctgaatctgaagaagatatgaagtttgtgcagtcatattgcgaagcggaacatatcctctgcgaaacggtacagattgatgtttctgcatacgcaaagaagaataagctgaacaagcaggctgccgcgcgtgattgcagatatcagtttttcgaagatctgatgacaaaacaccaagcgaagtttttggcgctggctcatcacggcgatgaccaggttgagacaatgctcatgaggcttgcgaaaggtacgctcggggcagggcttgcgggaatgcagcccgtccgcgaatttgcatccggctggctgatcaggcctttcctctatgcggcaaaggatgaaatccttgaatactgccgtcaagaagggctcagctacagaacggatgagagcaatgcaaaagacgattatacaagaaacagattcagaaagaccgtgcttccttttttaaaacatgaatcacctgacgttcataaaatgtttcaaaaggtgagtgaagcactgacagaagacgaacaatacctgcagtcattaacgaaagaacgaatgaataaggttattacaagcaagtctgacacatcggttgaagtcaattcctctcaattgcttgcccttccgatacctttacaaagaagaggagttcaactaatattaaactatctttatgaaaacgttccatcgtcgttttccgcccgccacatacagcagtttctcgaatgggcggaaaatggaagcgcctcgggagtgcttgattttccgaaagggctgaaggtggtcaaatcatatcagacatgtttgtttacatttgaacaatggcaatgtgaaaaagttccctttgagctgcagctgcaaggagcggaaggcgagactgctgttctccccaacggctttatgatagaggtggccgatcaggctgaccctcatatcaaaaatgggaatgctgtttttatgacaagcagaaacaaggtgcaatttcctttaacaatccggacgagaaaaatcggcgaccggatcaaacttaaagggatgaatggctcgaaaaaggtgaaagatatatttattgatcataaactgcctctgcgggatcgggacgaatggccgattgtaacggatgcgagcggtgaaattatctggctgcctggcttgaaaaaatccatctttgacgatcttgtgatttcaaacagtgaccgcattgtattacaatatagacagcatgaaaagtgtagggggcaagcattaacatgaaacaggatatcgaaaaagtgctgatctcagaagatgagatccagcagaaagtaaaacagcttggagaacaattaacaagcgagtacagcgacacgtttccgttggcaatcggtgtgttaaagggagcgcttccttttatggctgatcttataaagcatattgatacatatttggaaatggacttcatggatgtatcaagctacggaaattctacggtttcttccggagaagtcaaaatcatcaaagatttggatacatctgtagaaggccgggacatcttaatcattgaagatattatcgacagtgggttaaccttgagctatctcgtagaactcttccgatatcgtaaagcgaaatcaattaagattgttaccctgttggataaaccaagcggaagaaaagcggacattaaagcagacttcgtaggctttgaagttcctgacgcgtttgttgtgggttacggacttgattatgccgaacgctatcgcaatctgccttacatcggagtattaaaaccggcgatttatgaaagctgatcggctgcctgcttccgagatggttatcggttgtattggaatgattttctatggtactattgaacatagttgtgcttactgtgggaggaggtaaggaatgaatcgggtcttccgtaataccattttttatttacttattttattagtagtaatcggggttgtgagttacttccagacttcaaacccgaaaacagaaaatatgtcgtacagtacgtttatcaagaacctcgatgaagggaaagttgatagcgtatcggttcagcctgtcagaggtgtttatgaggtaaaaggacagctgaaaaaatacgacaaagaccagtactttttaacacatgttcctgaaggaaaaggagcagaccagatatttgatgcaattaaaaagacggacgtaaaagttgatcccgcacaggaaacaagcgggtgggtgacgttcttaacgacgatcattccgtttgtcatcatctttattctgtttttcttcctgctcaatcaggctcagggcggcggcagccgtgtcatgaacttcggaaagagcaaagcgaagctgtatacggaagaaaagaaacgcgtgaagtttaaagatgtagccggcgcggatgaggagaagcaggagcttgttgaggttgttgagtttctgaaagatcctcgcaaattcgccgagcttggcgccagaatccctaaaggcgtgctgttggtcggacctccgggaaccggtaagacgctgcttgcgagagcctcagccggtgaagcgggcgttcctttcttcagcatcagcggatctgacttcgttgaaatgtttgtcggtgtcggtgcttcccgtgtgcgtgatttattcgaaaatgcgaaaaagaatgcgccttgtctgatcttcattgatgagatcgacgcggtgggacgtcagcgcggcgcaggtcttggcggcgggcatgatgaacgcgaacagacgctgaaccagctgcttgttgagatggacggtttcagtgcgaatgaaggaatcattattatcgctgcgacaaaccgtgcggacattcttgaccctgcattgctccgtccgggacgttttgaccgtcagattacggtagaccgtccggatgtcatcggccgtgaagccgtattacaggtgcatgcgagaaacaaaccgcttgatgaaacggtgaacttaaaagcaatcgcttcaagaacacccggtttctcaggcgcagatttagaaaaccttcttaacgaagcggcactcgttgctgcccgtcaaaacaagaagaaaattgatatgcgcgacattgatgaagcaacggaccgtgtcattgcgggtcctgcgaagaagagccgcgtcatctcgaaaaaagaacgcaatatcgtggcgtaccacgagggcggtcacaccgttatcggacttgtgctggatgaagccgatatggttcataaagtaacgatcgttccgagggggcaggctggcggatacgcggtcatgcttccgagagaagaccgttacttccagacaaaacctgaacttctcgataaaattgtcggtcttctgggcggacgcgttgccgaggaaattatcttcggcgaagtcagcacgggcgctcacaatgacttccagcgggcaacgaacattgccagaagaatggtgacagagttcggtatgtctgaaaaactcggaccgcttcagttcggtcaatctcaaggcggtcaagtattcctgggccgggatttcaacaacgagcaaaactacagtgatcagatcgcttacgaaatcgatcaggaaattcagcgcatcattaaagaatgttatgagcgtgcgaaaaccatcctgactgaaaatcgcgataagcttgaattgattgctcagacattgcttgatgtggaaacattagatgcggaacaaatcaagcatctcgtggatcacggaaaactccctgagcgcaatttctcagatgaccatcttcaaaaagatgatgtgaaagtaaacatcctgtctaaaacagaagacgaaaagaaagacgagccgaaagaatagctcgctttctgatatgaaaaccgccggcatataccggcggtttttttactggttccgttttgtttacaaaagagccgcagatcgtgtatggtattgtagaatgttgaaaatgttatgattagaaactattcaaaagtggtgatagaggttgttactggttatagatgtggggaacaccaacaccgtgattggtgtatatcatgatggggaattagaatatcattggcgcatagaaacgagcaggcacaaaacagaagacgaattcggcatgctgctccgctccttatttgaacattccggactcatgtttgaacagattgaagggattatcatctcatccgtggtgccgccaattatgttttctttagaaagaatgtgcacaaaatactttcacatcgagccgcaagttgtcggcccgggaatgaaaacaggtttaaatataaagtatgacaatccgaaagaagtgggagctgacaggatcgtcaatgccgttgcggcgatccagcagtatggaggccccttaattgttgttgatttcggaacggcgacgacgtattgctacattgatgaaaacaaacaatacatgggcggcgcgattgctcccggcattacgatttcaacggaagcgctgtactcacgtgcggcgaagcttccgagaattgaaatcgcccgaccggacaatatcatcggcaaaaacacggtaagcgccatgcagtccggcatccttttcggctatgtcggacaagttgaaggcattgtaaagcggatgaaatggcaggcaacacaggaaccgaaagtcattgcgacaggcgggcttgcgtcattaatcgcaaacgaatcagactgtattgatattgttgacccgtttctcactctgaaagggttggaaatcatttatgagcgaaatcgcgtgggtcacgtataggaggtaaacgatggattatttaattaaagcaattgcatatgacggtaaagtgcgggcttatgcagccagaacgacagatatggttaatgaagcgcaaagaaggcatgacacgtggccgacggcatcagccgcaatcggccggacgatgacagcttctctgatgctaggagcgatgcttaagggtgaagataagctgacagtcaaaatagaaggcggcggcccgatcggagccattgtcgcagatgcgaacgcaaagggtgaggtaagagcatacgtatcaaacccgcacgttcattttgatctcaatgaacaagggaaactggatgtcagacgggcggtcggaactgacggaacactcagtgtcgtaaaagatttgggcttacgtgattattttacgggacaagtagagattgtctcgggtgaactcggtgacgacttcacatattatcttgtttcttctgaacaagtcccttcatctgtcggcgtaggtgttctagtaaatcctgataacaccattctcgctgcgggcgggttcatcattcagcttcttccggggactgatgaagaaaccatttcaacaattgaaaagcaattatctcaaatcgaaccaatttcaaaattgattcaaaaaggcctgacaccggaagaaatcttagaagaagttctaggtcaaaaaccggacgttctcgaaacaatgccggtcaaatttcactgttcttgttcaaaagatcgattcgaaacggccattttaggactaggcaaaaaagaaatacaagatatgatagaagaagacggaaaagccgaagcggtttgccatttttgtaatgagaaatatttatttacaaaagaagaactggaagagcttcgtgacgaaacaacccgctagctctttagcgggttgttctattttataaaagggatggggtagattttgaaatcgagaacacttttgacgattattgtagcggcgctgttagtatgcagtgtgacagtggcgtataagttaacaaaatcccaagccgcggggtcatctgaagaatccatcgcgacaatcggtgataaacatatcacacggcaagactggatgaaaaagatggaagaccagtacggaaaatcaactctggaagacatgattaatgcacaagtagtggaagagcttgcgaaaaagaataaactcacagtttcaaacagcgaattggatcgggagtttcttttaatcaaagcggtagataattcattttatgaagacagccatattaccgaaaaagaatggagagaccagatccgctacaacattcttcttgaagaactgctgacgaaggacatcgatatatcggataaggaaatgcaatcattttataataaaaataaagaattgtaccatttcgatgattcctacagaatccggcacatcgtcgtcaaaaacaaagaagaggcggacagggtgcttgctgatttgaaaggcggttccagctttgaagccgtcgccgctgagcgttccacggacagatacacgtcacagtatggcggagacctcggctttgtgacagaaaagcaggaaaatatcccgcaggcatatatcacagaagctaaaaatcttaaagaagatgaatggtccgctgaaccgattaaagtttcttcaggatacgccatcattcagctgaaagaaaagcttaaatcgagaactttctcatacaatgaagtgaagagccaaatcagacgccagatcgcgatggatcaattaggtgacaaggcgacagtcaaaacgctgtggaaagaggcgggggtctcttggttctacggggaaaaaagaactaaatgattgacaaaaaattttgaaattgataacttatatttataataccaataaatttagtcggaaattgaggtgtccaacatggtgcgtattgcaaattctattactgaactaatcggaaatactcctattgtgaaattgaatcgcctgacggatgaaaacagtgcagatgtatatctgaagcttgaatacatgaatccgggcagcagcgtaaaagaccggatcggagtggcgatgattgaagcggctgaaaaagaagggaaattaaaagccggcgacacaatcattgaaccgacaagcggaaatacaggaatcggtcttgcgatggtggcagcggctaaaggtctcagagccattctcgttatgcctgatacgatgagtatggagcgacgcaatctgctgcgcgcatacggagcggagcttgtgctgactcccggcgcagaaggaatgaagggcgccattaaaaaggcggaagaacttgccgaggaacacggatactttgtgcctcagcaattcaacaatgcggcaaacccggaaattcaccgccaaacgacagggaaagaaatcgtagaacagtttggtgacgaccagcttgatgcgttcgtggccggaatcggtaccggcggaaccatcacgggagcgggcgaagtgctgaaagaagcatatccatccatcaaaatctatgcggtagagccggcggattctccagttctttccggcggaaaaccgggcccgcataaaattcagggtatcggagcgggatttgtccctgaaacattgaatacggacatctatgatcagatcattcccgtcaaaaacgaggatgcatttgaatatgcccgtaaaacggcaaaagaagaagggattcttggcggcatttcttccggagcggccatttacgcggcactggaaatcgcgaaaaaattggggaaaggcaagaaagtgcttgcgatcatccctagtaacggagaacgttacttaagcacaccgctttatcagtttgaatagagacatacacacggctcccggctgtatccgggagtttttttgtgcctgaagcatcgaaaatccaaaaaacgtttcgaattttatggttggaagtgaaattcacttttttcaccagtgtgattgctttaaaataaaactacagtaaaacgaagcagaggattgatatgatggcacaacgcagaccggcaggaagaaaaataccttttacgaaacaagcatttttacagcgatatgaaaacctttcgaaatcgagaaaacggcatgttctgctcgaaagcgcgagagggggaagattcagtatagccggtctagatccgattgcgtccgtcagagggaaagacggaattacaacgatcaagcatgagggggaaacactgtttaaagaaggtgacccgctgcgggcctttcatgaatggtttggaacgctcggaacggaaacaaacgttgagtttccggactttcagggcggtgcgattggttttatcagttacgactacgcccgatatattgagaattttaagatgctgtcgttagatgatctggaaacacctgatatttactttcttgtttttgatgatgtggccgtttatgaccatgaggaagaggcgttatggctcattacccatactgaagcggaagaagcggatcttgcggaagaaaagctgtcccgcttagaggacatgtggtgttccctccaaacggcggacgagcctttttcaccgctgaatcggaatggggacggatcgtacgccgctccgttcactgaggaaggattttcacaggctgttgaacaaattaaacaatatatcgcgagcggcgatgtgttccaggttaatttgtccatcaggcagtctcagtccttatccgttcatccgtatgaggtgtataaacacttgagaaacgtcaatccgtctccttacatggcctatctcgagacaccggggtttcaagtgatatgcgggtcgccggagctattggtgacaaagaaggggaagaagcttgaaacgagaccgatcgcgggtacgcgttcaagaggaaaagacgatgctgaagacaaggctttggctgatgaattaattcacaatgaaaaagaacgtgcggaacacgtcatgcttgttgatcttgagcgcaatgacctcgggcgcgtatcgcgctacggctccgtgcgggttaacgaatttatggcgatcgaaaagtattcccacgtcatgcatatcgtgtcgaacgtacagggagagctgcaggacggatatgacgcgacagacattattcatgcggtattcccggggggcaccatcacgggagcgcccaaagtgagaacgatggaaattatagaagagcttgagccgacaagacgggggctttatactggatctataggctggttcggatttaacggagatttgcagtttaacattgtgatccggacgatctatgcagccggcggacatgcttttatgcagtccggagcaggagtggtcattgattcggttccgaagcatgaatacaaggaatcgttcaaaaaagcttttgcgatgaaaaaggcgttagagctgagcgaagaagagacaaaaaatcagacgaggtgagcagagatgattttaatgattgacaattatgattcatttacgtacaacttggttcaatatttgggtgagctcggggaggaactgatcgtcagacggaatgacgagattacgattgagcagattgaagagctgggtccggacttcttaatgatttcacccgggccgtgcagtcctgatgaagcggggatcagcctcgaagccatcaaacattttgccggcagtattcctattttcggcgtatgtctcgggcatcagtcgattgcgcaagtattcggcggcgacgtcgtcagagcggagcggctcatgcacggcaaaacgtcagaagttatgcatgacggacagacgatttttaaaggcctgcaaaatccgctggtcgccacccggtatcattcacttattgtcaaagcggacacgctgccggattgttttacggtatccgctcaaaccaaagaaggagaaattatggcaatccgccataatgagctgcctgttgaaggtgttcagttccatccggaatccatcatgacctccttcggcaaagagatgctcagaaactttatagagacacaccgcaaaaaggaagtgacggtgtgattatatatttgaatggtcaatatatagaggagaaagaagcggcgctttctccttttgaccatggttatctgtacgggatcggcgcgttcgagacgttcaggctttacagcggccggccgtttctgccggatgcgcatgtcgccaggctcaacagggcgcttcgggatctgcagattgcatatgaggtgaacaaacaggagctgcttgatatgcttctaagactgttgctcctcaatgacatcaaggacggcagcgcacgtgtccggcttaacatctcggcaggcgtcagcgataagggatttgccgcgcagacttatgaaaagccgaccgtcctttgtttcgtcaaccggctcaatccggaaactctgcctgttcaaaaagaaggcaggcttctctctgtccggagaaatacgcctgaaggatcttttcggttaaaatcccatcactatttaaacaacatgtatgctaaacgggagatcgggaatgatcccaatcttgaaggcattttcctgaccggtgaaggagatgtcgcggaaggcattgtctccaacgtgttttggcgaaaaggagacaaggtctttacaccatccttggatacaggcattctcgacggcgtaacgagacagtttgttattgatgaattgaaacggcaggggacagaagtcaccgaaggtcgattccgttttcaatcaatgcttgaagcggatgaagcatggttgacaaactccgtgcttgaaatcatcccgttttctaaaatagaggaagtgccgctgcccggagtgagcggaaaaacggtgcaattgctccgtaagcagtatcagcaggaaataaacaaaatgaatgtacaggaggaggaacaaaatggcgcagcaaacaattgaacatcctaaactgattcatacaaaaaaaggcactctttcctataaagagaagacgctcgttatggggatattaaatgtaacgccagactccttctctgacggcggcaaatacgacagtacggaaagggcgcttctgcatgcggcgaagatggctgaagaaggggcgcatatcatagatatcggcggtgaatcgacaagacccggcgcatcactcgtgtcggctgatgaggaaatgtcacgagtcatccctgtcatagagcggatcacaagcgagctggacattccgctttcaatcgatacgtacaaagcgtccgtggcagacgaagcggtcaaagcgggagcctctatccttaatgacatctggggggcgaaaggtgatcctgacatggcgtcagtagccgccgcacacggggttccgattatcttaatgcataaccgcatggaaagaaactacaacgatcttattcctgatatgcttgcagacttgatggaaagcgtaaaaattgccgcggaagccggcgtcacagatgaaaatatgattctggatccggggatcggctttgcgaaaaactatgaggacaatctggctgtcatgaacaagctggaggtgttcagcgggttaggttatccgctgcttctggcgacatcgagaaaaaggttcatcggccgtgtgcttgaccttccccctgaagaacgtgccgagggaacgggagcgacagtatgccttggcgtccaaaaaggctgcgacattgtgagggtgcacgatgtcaaagagatcgcaagaatgacgaagatgatggatgctatgttgaacaaaggaggcgtacattatggataaagtatatgtggaaggtatggagttttacggatatcacggcgtgttcgaagaagaaaacaaactcggccagcgcttcaaagtagacctgactgccgaactggatttgagcaaagcgggaaaaacggatgacctttcttataccattaactatgcggaattgtacagtgtctgccgcggcatcgttgagggcgaacccgtcaatttggtcgagacgcttgcggaacggatcgcagacaccgtccttgagaaatttgagccggtgcagcaatgtacggtaaaagttgttaagcctgacccgccgattcccggccattataaatcagtagccatagaaatgacgagaaagaaatcatgaacaatacggcatatatcggcctcggttccaatatgggcgaccgtgaacattatttgcgccaggcagtggccatgctcacccggcatcatggcgtgacggtgtcaaaggtgtcctccatatatgaaacagatcccgtcggctatgaggatcaagatcagtttcttaatatggcggttgaagtgaaaacgtcgttatctccttttgaacttcttgatgtaacgcagagcattgaagctgaattaggcagaacgagagagattcgctggggaccgcggacggcagaccttgacattttgctgtataatcgtgaaaatattgaaacggagcggctgattgttccgcatccgagaatgtatgagcgcttatttgtccttgcgccgttaaaagaaatatgttcgcaggcggatcatatcacgataagcgctgaaacaaaccaagaaggtgtaagagtatggaagcagaaatctggggtaggcgaattcgtgcattcagaaagctgaaaggttatactcaagaaggatttgcaaaagcattaggtatatcagtttctattgtcggtgaaattgaacgcggaaaccgattgccgtcagatgccatcattcaagatgcggcagatgttttaaatataagtgcggacgaattggccccgcctgaaaaatagacaaatgaaaggaggggaaaaatgtttaaaatcggtgatattcaattgaaaaaccgggttgtgcttgcccctatggccggtgtctgcaactcagcgttcagattgactgtaaaggaattcggagccggattggtatgcgctgaaatggtcagtgacaaagcgattctttacaataacgccagaacaatggggatgctttacattgatgaacgtgaaaaaccgctcagccttcagatttttggaggaaaaaaggaaacccttgtggaagcggcgaagtttgtagatcaaaacacgactgctgatattattgatattaacatgggatgtcccgtacccaagattacaaaatgtgatgcgggcgccaaatggcttctcgatcccgataagatttatgaaatggtatccgcagtagtagatgctgttgataagccggttacagtgaagatgagaatgggttgggatgaagagcacatttatgcggtgaaaaatgcccaagccgttgaacgtgccggcggaaaagccgttgccctgcacggccgcacaagagtgcaaatgtatgaaggcactgcgaactgggatatcattaaagaagtgaagcaatccgtctccattcccgtcatcggaaacggtgatgtcaaaacgcctcaggacgcgaaacgcatgcttgaggaaacaggagttgacggcgtcatgatcggccgggccgcactcggcaacccgtggatgatttaccgtacggtgcactaccttgaaaccggcgagttaaaagacgaaccgaaagtccgtgaaaaaatgtcggtatgcaaactgcacttagaccgcctgattaagttaaaaggcgaaaatgtggcagtcagagaaatgagaaaacacgctgcctggtatctgaaaggtgtcagaggcaatgcgaatgtacgcaacgaaattaaccaatgtgagacgcgtgaagaagttgtgcagcttttagatgcatttaccgccgaagcagaggcaaaagagcttcaagatgcaaaagtaggttaatatacaccctctattgctgctcactgccagcttaccgctggcagtttttctgctttttcgtgaaatcaaaatgtaacggagtgataccaatgagtcaagaagagcaaaatcatgaggaattgaacgaccagctgcaagtcagacgagataaaatgaaccagctgagagaaaacggcattgaccctttcggcgaacgtttcgagagaacgcatcaatctcaacagatcattgacgcctaccaggagctttctaaagaagaactggaagaaaaagcggtcgaagtgaccattgcaggccgtatgatgacaaagcgcggaaaagggaaagccggctttgcgcatctgcaggacttagaaggtcaaattcaaatttacgtaagaaaagacagtgtcggcgaagaacaatatgaaatctttaaatcttcagacctcggagacgttatcggcatcacggggaaagttttcaaaacaaacgtaggcgagctttctgtcaaagcgacatctttcgaactgctgacaaaagcactgcgtcctcttcctgataaatatcatgggttaaaagacgttgaacagcgttaccgccagcgctatctcgatctcatcgtaaaccctgacagcaaacaaacgtttatcacacgcagcaaaatcatccaagcgatgagaagatacttagatgaccatggatacttagaagttgaaacacctacgatgcacagcataccgggaggagcgtctgcgcgcccgttcatcacgcaccataatgcgctcgacatgcctctttatatgcgtattgcgattgaactgcacctgaaacgcctgattgtcggcggattggaaaaagtctacgaaatcggtcgcgtgttccgtaatgaaggtgtttctacacgccataaccctgaattcacgatgatcgagctgtatgaagcgtacgccgattataaagatattatgagtcttacggaaaacctcgtagcacatattgcgcaggaagtgcttggaagcaccacaatccagtacggcgaagagcagattgatttgaaacctgagtggaaacgactccacatggtagatgcggtcaaagaagcgacaggtgtagatttctggaatgagatgactgttgaagaagcgcgcggtcatgcaaaagagcatggtgtcgagatcacaaactcaatgacggtgggtcatatcatcaatgaattcttcgaacgaaaaattgaagaaacactcattcagcctacatttatttacggccaccctgtagagatttctcctcttgctaagaaaaatccggaggactctcgctttacagaccgttttgaactgtttatcgtcggccgtgagcacgctaatgcgtttacggagctgaatgaccctattgaccagagggaacgctttgaagcgcagttaaaagaaagagaagaaggaaacgatgaagcgcatatgatggatgaagacttcgttgaagctcttgaatacggcatgccgccgaccgggggattgggtatcggtatcgaccgccttgtcatgctgttaacaaatgctccgtctatcagagacgttttattattccctcaaatgagacaacgctaataaaagggaaggcgccgtttctgcttatcgcagtacggcgcttttttagaaacaagccgctcgtaaaacttttttgattttcttttaaaaaactattgcactattatttgtgaggtggtatattattattcgttgccgctaaacaaggcgctgacgaaaaaagaaatttaaaaagttgttgacttcaagagattgataagatataataataaagtcgcttgaacgaaagacaaaatgatctttgaaaactaaacaagacaaaacgtacctgttaattcaaagttttaaataaatcgcacagtgatgtgcgtagtcagtcaaactactttatcggagagtttgatcctggctcaggacgaacgctggcggcgtgcctaatacatgcaagtcgagcggacagatgggagcttgctccctgatgttagcggcggacgggtgagtaacacgtgggtaacctgcctgtaagactgggataactccgggaaaccggggctaataccggatggttgtctgaaccgcatggttcagacataaaaggtggcttcggctaccacttacagatggacccgcggcgcattagctagttggtgaggtaacggc

SEQ ID NO: 14 - DNA, 53912 bp, Bacillus methylotrophicus
tctgaaccatgcggttcagacaaccatccggtattagccccggtttcccggagttatcccagtcttacaggcaggttacccacgtgttactcacccgtccgccgctaacatcagggagcaagctcccatctgtccgctcgacttgcatgtattaggcacgccgccagcgttcgtcctgagccaggatcaaactctccgataaagtagtttgactgactacgcacatcgctgtgcgatttatttaaaactttgaattaacaggtacgttttgtcttgtttagttttcaaagaactttgttgcttctctcgaagcgacctcttaatcataacattttcagtttgctaggtcaatacttttttaaaaaaatattttcactaggcttgcctttctattaaaaagacaacaaaaagaattatatcagtatcatcgctatgtgtcaaagctttttttcatttctttatatagtaaaagcgcagcctgttgcagctgcgctttttcgtttatacttcttccgtttcttccggctcttcttcattcttttccacaagcgccacagtggctacatgctcttgatcagacatgcggatcagacggacgccttgtgttacgcgtcccgtagtggaaatatcattaatatccattctgattaacacgccgcttgccgtaataatcattaagtcctcttcgccttttgttgctttcacggttactaacggaccgttgctgtcagtgattttacatgttttaaggccttttccgccccggctttgaactctgtattctgaagccggtgtgcgtttgccgtagccgttttctgtcactatgaggacatgggagtcttcttcaagaatctccatgcctaccacgacatcatcgtctgtcagcgtgatgcctttaacacccgcagctgtgcgtcccatttgtcttacatctgcttcagggaaacggatcagcaaaccgttcttcgttccgatgatgatttgtttcttgccgtcagtcaggcggacggccatcagttcatcgtcttcccggagacctagggcgatcagcccgttattccgtatattcgcaaactgggacagtgccgtacgtttcgacaccccttgtttggtcgtaaagaagaggtattgctcctcatcaaacgtgctgaccggaataatagcattaatccattcgcctttttcaacctccagaaggttaataatcggaatgccttttgccgtacggccgtattcagggatttcatatcctttagaacggtataccttccctttattagagaagaacaggatcgtatcgtgcgttgatgtggaaattaagtgttccacaaagtcatcttcattcgttcccattccctgtacgccttttccgccccgtttttggctgcggtatgtggacgccgggagacgtttaacatagccgttatgggtcagtgtgatgacgatattttctctctcgataagatcttcatcttcaattgtttcaagaccggacgtcacgatttcagtgcgtctctcatcattgaaacgctctttgatttcattgagctcttcacgaatgatctcaagaactcttgcttcattggctaaaatatctttcagctcggcgataagcgcaacaagtgattgatattcctcttcaatcttttcgcgctccaaaccggttaatcgctgaaggcgcatatccagaatggcttgcgcttgtttttcagtcagtgagaattgttcgatcaaacctgttctcgcaatttcagccgtctgggaattgcggataagagaaataacggcatctaaatgatcgagagcaattcttaaaccttccagaatgtgagctctcgcttccgctttgcggagttcgtaagccgttctgcgccggatcacaaccttttggtgatcaagataatgctccagacattgtttcaggcttagtaccttcggctgtccgtcaacgagcgccagcaggttgattccgaaagacgtctgcagggccgtttgtttgtacaggttattcaaaatgacgtgagcattggcgtcacggcggatctcaatgacgattctcattccgttacggtcggattcgtcacgcagatccgtaattccttcgatttttttgtcccggacaagatctgcgattttttcaattaatctcgctttgttcacctgataaggaagttccgtgacaataattctttcttttcccgatgatgtctcttcgatttcagccttagcccggatcgtaatggatccccgtccggattcatatgccttgcggatgccgctccggcctaaaatctgacctgcagtcggaaaatccgggcccgggatgtattccatcagctcctggtttgtaatctcaggattctcacttacggcaagtacgccttcaatgacttccccaagctgatgcggaggaatatttgtcgccattccgaccgcaataccggcagctccgttgacgagcagattcggaaatctcgaaggcatgacgacaggttctctttctgcgccgtcatagttatcttgataatcaatcgtatctttcgtaatgtcccgaaggatttccattgcgatttttgacattctcgcttctgtgtaacgcatcgcggccgctgagtcgccgtcaaccgaaccgaagttgccgtgtccgtcaacaagcatgtagcgatagttaaaatcctgcgccattctgaccattgattcgtaaaccgctgagtcaccgtgcgggtggtacttaccgataacttcaccgacgatacgggcagattttttatatggtttgtcactggtcatgcctaaatcattcatcgcgtacaaaatccgtctgtgaaccggcttcagaccgtcacgcacatccggaagcgcccgggatacgataacgctcattgcatagtccaggaaggatgtccgcatttcctgactgatattgacttcacgtacttgtggtgtgttttgttcactcattaaaaaaacctccctgaagtatcacatgaaataatgtgggagtagattgtccattatgatcttcaatacgatttcactattctccattatatcaataaacttgtgtttatacacattaatttagtagaatatacgggttttgcgggttttcagaggctttagaagccgctttgagaaaaaagccttatttcttaacgaaaataaggctttcttggttaaatatcaagatttttcacgtatctggcgtttgcttctatgaagtttctccgcggttctactttgtcacccatcagcatttcaaaagtctcgtcagcgtccattgcatcttcaagattgacttgcagaagcgttctggtcgcagggtccattgtcgtttcccaaagctgagtcgcgttcatttctccaagacctttataacgctggaggccaggcttaggtgattgcggaagctcttttaacagctcatcaagctgcttatcgttataagcgtattccacccgttttccctgctgcactttataaagcggcggctgggcaatgtagacatagccgttttcgatgatttcccgcatgtatctgtagaagaacgttaataaaagcgttctgatgtgggcgccgtcaacatctgcatccgtcatgatgaccactttatgataacgcgctttttcaagattaaaatcttctccgattcctgttccgagggccgtgatcattgatctgacctcattgtttgagagaatcttatcaagtctggctttctcaacgttcagaatcttaccgcgcagcggcagaatagcttggaaatgacggtcccgtccctgtttcgctgatccgcccgcagagtcaccctctacgatatacagctcggaaatgctcggatctttagaagaacagtccgccagtttgcccggcagattggaaatctcaagcgcacttttgcgccgggtcaattcccgtgcttttttcgctgccatccgcgctcttgcggccattaaacctttttcaacgattttgcgggctgagtccggattttcaagaaggaatgtttccagcgcagaagaaaacagcgtatcagtgatcgttctcgcttcggagttgccgagcttggttttcgtctgcccttcgaattgcggatcagggtgcttaattgaaataatggcagtcagcccttctctcacatcatccccgcttaaattcggatcattttctttgaaaatcccttttcttcttgcatagtcgtttatgacacgggtcagaccggttttaaatccggcttcgtgcgtcccgccttcgtatgtgttgatattattcgtgaaagaataaatattgcttgtatagctgtcgttgtattgcaatgcaacttcaaccgttatgccgtctttctcgccttcgatataaatcggctcttcatgaacgacttctttggaacggtttaagtactcaacatagcttttgattccgccttcgtagtggtactcgtttttccgttcttgtccttcacgtttgtcttcaatcgtgatgtttacgccttttgtcaggaaggccaattcccggacacggtttgaaagcagatcatagtcgtatacggttgtttctttgaagatttccggatccggaacgaagtgcgtaatcgttccggtcttatcagtatcaccgatcacttcaagatcggccacaggtacaccgcgctcgtacgcctgatagtggatttttccgtcacgatgaaccgtaacgtcaagagtggtcgacaaggcgtttacgacagatgcccctacaccgtgaagaccgccggatactttatatccgcttccgtcaaatttaccgccggcgtggagaacggtcatgatgacttcaaccgcagggcggcccatcttctcctggataccgaccggaattccgcgcccgttgtccttaacggtaatgctgttatctttttcaatctcgatgttaatatctgtacaataaccggccagggcttcgtcaatactgttgtcgacgatttcccacaccaagtggtgaaggcctttgctgttagttgatccgatgtacatccccggtctctttcgaacagcttccaaaccttctaatacctgtatctgattctcatcataactattttgctgctgttccatagccatgcacattcacctacacttttcttaaacgatatattcattgtaaagatccgctaagaatctatttctaacataaattgcgcacgtttcttcagtgtgccggaagataagggagagtaatatatattctcagtcgtgactacgatagactttggcgtgccgtttacggacggcactactttttctttctgtctgtccagaaattcttcaacgatcggcgatacattgaccttgcagtcaaaaatgccgacgatatcgcgtgttgaaacgacaaagtcgtcacctaaatgaatatacaatcgctcacctcatttcttcacttcactaacgtaccgttttccacacggaacattcctgcttgatgtaaggtatcgtggtcaatgccatccacgcttgtcgtggtgacaaatgtctgcacacggccttggatcgtatgaagcaaatgggactgtcggtaatcatccagctcgcttagtacatcatccaaaagtaaaatggggtattctccgatttcttcatgaatcaaatctatttcggccagcttcaaagacaaagccgtcgtacgctgctgtccctgcgaaccgtacgtctgcacatcgcgtccgttcacataaaaaaggacatcatcccgatgcggtccgaataatgtgacgcctcgttctatttctttttcttttaatttcgaaaaagactcctggtagctgttacctattttcgacaaatctttgggatctgatacatcaagcgccgtgtggtacttaagcgtcagttcttcaagtccccgggaaatgccggaatggatcggctgcgcccatttttcaagctgcgccgtaaactgcagacgtttggcgacaacttttgcggctgcttcaatcagctgatcagtgagaacgtcaagcatggtccggtcagtctgtttccggctttgcagctgtttcagaaaatgattccgctgtgaaaggattttttgataaagagataaatcatacagataaacggcagaaacctgcccgatctccatatcgagaaatctcctcctcacctgggggcttcctttgacgagatttaaatcctcaggggcaaacataatggtgttcagcgctccgacatactgactgagtttttgctgctctatatgattgaccttgccctttttaccttttttggagatgacaagctgcatcgggatgtccccgtttcgcttcatcactcttccttctattttagcatagtcttcgtcccaccgtataagttctttgtcatttgaggtgcggtgtgattttgccatcgaaaggacatagatggcttccatcagattggttttgccttgggcattttccccgatgatcacattcaccttgttttcgaattgaagctcagcgcgctcataattacggtaggatgttaattctaaattttggatatacaaccgctgtcacccgctttaattgacgacttgaaatgaaccaaatccttcaatcgcgaccacgtctccaacgtaaagctttctgccgcggcgattgtcaggttcattgttgacagtcacctcatgctcgctcagaaaccacttcgccatgccgccggactgaatcacatcggctaattttaaaaactggccaagcgtaatcatttctgtatcaatcgaaatcggatttgccataatatcgacctctttcaaatatcactaatatctaattgtactaaaaaatcctgaaataaggaaagggaaaacttgagggagcggctgatgaatagaaaagctgccgaactaagccggcagcacattctgtttgattaatacgttctgaccggaaggatgagctgaacgatggtttcatcattcggcgtacggataagaaacggtctcatcgctcccgtaaaactgatacggatgtccgctccttcaagtactttcagtgcgtccatcatatattttggactgaatgaaatatttaattcctcgccgtcaatctggtcagccagcacagcttcgaccactttcccgatttccggagaatttgatgaaatctccagcgaatccgccggtttggcagaaagctttacaacgttgttgcggccttctctcgccaataaagaagcacggtctatcgcctgtaaaaattccttcgtgttcacgacgatttccgttttgctttcctgcggaattaagctggtcgtgtccggatagtttccgtcaagcaatcttgagaagaacaatacgtttttcgctttgaacagaacttgggtttctgtaatgacgatatcaaccagttcttggttgtcatcaagaattttgctcagctcggttaagcttttcccaggaatgaccacgttataagagctgtcttccggaatatcaagcttcgcctttcttaaagcgagtcggtggctatccgtggcagtgcataataattcaccgttttcgactttccagtttacacctgtcaagatagggcgtgtttctgaggcggacacagcgaacaccgtttggcggatcaggtttttcaaaagatccgtcggaatctgaatggcgtgatgctcttcgatttgcggcagatgcggatattcatctgcatcaaggccgtttaaattaaattcggcttttccggaacggataatcgttaaatattgattttgaacttcgatttcaacagtcgccatcggaagttttttaacgatttcgctgaagaaacgcgcttgcagcacgatacttcccggctgatcgatcgtcacgatttctttatcatcttcttctttcggaatgaatgactcgattgaaatatcagagtcacttcctgtgaaagatactccttcatctgaggcgacgatcttaataccggtgagaatgggaattgtggttctggatgaaacggcttttagaacgtcttgtacactttcgactaaacgatctttttgaatcgtaaatttcatgtttatcctcctaacggataatataattaatatattttaaaaatagcagtagtaatagtagggcctgtggatttgtggataagttgtgaaaaagacaggaaacacagcctatccacatgtggacagactgtgtatggctatgaaaaagttattcacactttccccgattcatccgagggcactattatttaagcagttcttttatttctttcacctgctgctgaagctgctcgtcatcaatcagcagttttgaaatcttttcatgggcgtgaatgacggttgtatggtctctgccgccaaattcttccccgattttaggcaaagaagaatccgtcatttctcttgaaagatacatcgcaatttgtcttgggaacgccacggatttcgtgcgctttttcgctttgaaatcttcaagcttaatgttgaactgctgtccgacaatccgctgaatctcttttatcgtaatgaccttcggcttagaagacggaataatatctttcaatgcttctgcagccaggtctgcgttaatgtctttattgattaaggatgaataggcgacaacccggattaatgccccttccagttcgcggatgttgctgtcaatctgattcgcgatgtaaagcatgacctcgttcggaatatcaagaccttccgccttcgctttttttctcaggatggcaatccgcgtttccagatccggcggtgtgatatccgtaatcaatccccattcgaaccgcgaacgcaggcggtcttcaagggttgggatctctttcggcggtctgtcgctggaaatcacgatttgtttgctttcttcatgaagcgtgttgaatgtatggaaaaactcttcctgtgtttgttcttttccggctaaaaattgaatatcatctatcaaaagtacatcaacgttccggtagcggttgcggaaatcaacggctttattatcgcggattgagttgatgaattcatttgtgaatttttcagaagacaggtacaccactttggctgaaggattatgatcaatgacataatggccgatcgcgtgcattaagtgggtttttcctaagccgactccaccgtatataaataaagggttgtacgctttagcgggtgcttccgccacagccagtgatgctgcatgggcgaatcggtttcccgatccgatgacgaatgtgtcgaatgtatatttcgggttgagcatgctttggggaaaatcagacggttcctcttttgccgcttttttcacttgcggtttcggtaaaaagttttcttcgtcctgattttgaggaatgacaaatttgacgctcaattcttccccggttaattcgtatatggtatctgcaatgagatgtaagtacctggactccagccagtctctggcaaattcattgggagcggtgatggttaaggtatccccttgcagcgaatgggctttcgtcgacttcatccaagtttcgaaactcggtttgcttagctttttctcaatttgagctagagcttgattccaaagatccaatatattctccattatccggcacagccctccttttctttaaaaatcagcgccctttccctgttatagaacacaaaaaaagagcatatggctctgaccattcgtacacacgaaatgttgaaaacatatagtatagtagaaaaacagcttttcgacaaattccacaagttgtggacaacaatctacacaagccgtgtgaaaacaatccacaacttatccacagtttgtggataaagagaatgggctggataagtaattaagagttaaaacacaaatataatatcaaattaagcgaggacttgcaatggttctcgtaatcttatccacaaacctgacaacttgttgaaaaatctttgtccacatgggttagcaatgtgaaaatgttgtcgataacgactgtggatattaaaaaaaggccaaaaaattatccacatgtcgtttttccgggggagcgcggcttttttttttgcgttaaaaaaaggaatatgaaaaataaggtttctaaactggttaaggtatgttatcctattatggttgtaagaaataaaagcactgctgaagttgacaatgaataggcagcacaaatataataagtaagactgtctttaacagctattcctcgagggaggtgtcataaatgaaaagaacattccaaccgaataaccgtaaacgcagtaaagttcatggcttcagaagccgtatgagttcaaaaaacggtcgtctagtattagcacgccgtcgccgcaaaggcagaaaagtattatcagcttaggccactgaataatgtcagtggtcttttttcacattaagagagtgagatgtcatgcgtcgcccggtactggagaaatttcttcagtattccggcggcccgttttttttagatagaaataaaagtttctgcgagtgaatatcggagtgaattaaagtgaagaagcgaaatcggttaaagaaaaatgaagattttcaaaaagtgtttaaacgcggaacgtctatggcaaaccgccagttcgtgctgtatacgcttgatcagccgaaacaggaagagctccgggtagggctttctgtcagtaaaaaaatcggcaatgccgtcgtgcgcaatcgggtgaagcggttaatcagacaggctgttcaggaggaaaaagagctgctcaagccgaaagattttattattatcgcaagaaaacccgccggcgacctcagttttgaagaaacgaaaaagagtctgcagcacttattcagaaaaacctcattatataagaaatcttcgtcaaaatagctcatattttgttttcttcacgtttttaaaagcgcttccttttatttggcgaaaaatgaacgccatttgaaactgaaagatgctaaaatacatacaaggttcataaagattggtataggaggaaacgttcttgaaaaggagaatatggttactactgagtatggtcggtatgctcgtgctgctggccgggtgctcgagtgtgaaagagccgattacggcgaatagtccgcatttctgggacaaatatgttgtgtatccattgtcagaagttattacgtacgtagcgaaactgacgggtgataactatggtttatcgatcatcatcgttacgattttaattcgtctgctgattctgccgctgatgatcaagcagcttcgaagctcaaaagcgatgcaggcgctgcagcctgaaatgcagaagctcagagaaaaatacagctctaaagatcaaaaaacgcagcagaagcttcagcaggaaacgatggccctgttttcaaagcacggggtaaacccgctggcgggatgtttcccgatcctgattcaaatgccgattttgatcggattctaccacgccattatgcgtacgcaagccatttcacagcacagctttttatggtttgacctaggagagaaggatccttactatattcttcctatcgttgctggtgtggccacttttgtccagcagaagctgatgatggccggaaatccgactcagaatcctcaaatggcaatgatggtatggattatgccgatcatgatcatcgtatttgcgatcaacttcccgagcgcgctttctctgtattgggtagtcggaaacctgtttatgattgctcagacattccttattaaaggacctgacattaaacacgatccggaaacgcagaaagcgggaggaaagaaaaagtgaagaaggtgactgctgcgggacggaatgtcgaagaagcagttcaatcaggccttcaggaacttcaactgacgaaagatcaagtagaaataacggtggtgcaagaaggatacaaagggtttttgggtatttttgtaaaaaagaatgcgatcgtagaactggaagagaaaaaaaatcctgttcatgaagcgaaagcgtatttggaagaaatcatccattccattgccggaccttctgagattgttacggaagaaaacaagaaaacagtctgttttcacattaaaggtgaaaaagcggcgctgcttattggcaaaagaggacaaacactcaatgccctggaaacattgacgcagcttgttttgaaccgcggctccggccagtatcgccaagccgttgtcgacgctgagaattatcggcggaaaagaagagaaattctggagcagctggcaaacaggctggccaagcaagtgtcgaaaacgaaaaaagatgtgcatttagaaccgatgccgtcaggtgaaagaaaaatcatccatgacgcgctgtcaaagcatccaaatatcaaaacgttttctaccggtgaaggccggtaccgccatctcgttatttcccataaagatagcagaaaaccgaagtccgggtaaaatcggaacttcggtttttttattggtaaaaatggctctattcctaagcagaatcgcacttttcgcgtttaagttttttctttttcggtctatgctgttgataaaaaaggttttaggaaataaaattaattgttattcacatgtggataagttaaagtaataagggatgaatttctgcctttgtggataacgtatcttccacttcaaaccaaactatgttatcttttaattttggcgtaaataaaattttttatatagatggaaacagagataaagagaggtgaacagcatggatacaattgcagcgatttcaactccgatgggtgaaggcgcgatcgcgatcgttcggctgagcggccctgaagccgtaaagatcgccgacaaaatgtacaagggtccgaaaggcaaaacgctcagttcggcagaatcgcataccattcattacgggcatatcgcggacagcacgacgggacggattattgaggaagtcatggtgtctgttttaagagcgcccagaacattcacaagggaagatgtcattgaaatcaactgtcatgggggtattgtgacggttaatcaggtgctccagcttgctttaagagaaggtgcgagactggcagaacccggtgagtttacgaagcgcgcatttttaaacggacggattgacctttcacaggcggaagcggtgatggatctgatcagggccaaaacggaccgtgccatgaatgtcgccatgaaccagatggaaggacggctttccgcgcttgtccgccgtctgcgtgatgagttgttagaaacacttgcccatgttgaggttaatatagattatccggaatatgatgacgtcgaagaaatgacgcatcagcttttagtggagaaggcaagcggcgtgaagaaagaaatcgaggcgctgctccgtacgtctgagcaggggaaaattttgcgtgagggactgtctaccgtgatcatcggccgtccgaacgtcggaaaatcctctctgcttaacagccttgtccatgaaacgaaggcgatcgtaactgatattccgggaacgacgcgtgatgtgattgaggaatatgtcaatgtccgaggcgtgccgcttcggcttgtcgataccgccggaatccgtgagacagaagacatcgtcgaaagaatcggtgtggaacggtcacggcaggttctgaaggaagcggatctcattttgcttgtgcttaaccacagcgaagagctttctgaagaagatgtgaaattgtttgaagcggttgagggaatggatgtcattgtcattatgaataagacggaccttgaggctaagattgacgctgagcgcgtcaaggaactggcgaaaggccggcctgtcgtcacgacctcattgctgaaagaagaaggcattcaagatttagaggaagcgattcagtcgctattttatacaggagcgatcgaaagcggagatctcacctatgtcagcaacacccgtcatatctcgattctgcatcaggcaaagcaagcgattgatgatgcgctgaacggaattgaacaggatgttccgattgatatggtgcaaattgatttgacaaggtgctgggagctgctgggcgaaatcatcggtgatgccgtccacgaaagcttaattgatcagctcttttcacaattttgtttaggtaaataaaagggaggaaaaaaccatggggtatgaagcaggccaatacgacgtgattgtcatcggcgccgggcatgccggtgttgaggctgccctcgcatccgcgcgccagggagccaaaacgcttgttttgacgatcaatcttgatatggttgcgtttatgccatgtaatccgtctgtcggcggccccgcgaaagggattgtcgtccgcgaaattgacgcgctcggcggagaaatggctagaaatatagataaaactcatattcaaatgagaatgctgaatacaggaaaaggtccggccgtacgggcgctgcgtgcgcaggcggataaattccaatatcagcacgaaatgaagcatacgctggaaaaaacaccgaatttgacacttcttcaagggattgccgagcgtttaatcattgaagacggggagtgccgcggtgtcattacgcaaaccggtgctgaatataaggcaaaaacggtcgtgctgacaaccggaacgtatttaagagggcggatcattctcggtgatctgtcttactcaagcggtccgaataaccagcagccgtctattaaactttctgagcacttagaggagctcggttttgatctcgtccgttttaaaacgggtacgcctcctcgtgtctcaagcgattccattgattacagcaaaacagaaatccagccgggggacccggttccgcgcgctttctcatatgaaacggttgaatacattaccgatcagctgccttgctggctgacttacacgagtcctgagactcatgagatcatcgacagcaacctgcatcgttcgccaatgtattccggtatgattaaaggaacgggaccgagatactgcccttcgattgaagataaagtcgttcggtttaatgataaaccgcgtcatcagattttccttgagccggaaggcagaaatacgcaggaagtatacgttcaaggtttatccacgagtcttcctgaggacgtgcagcagcggatgctggcgaccattccgggactggaaaaggtgcagatgatgagagccggatacgcgattgagtatgacgcgattgtaccgacgcagctctggcctacactggagacgaaaaaaatccctaacctgtacacggccggtcaaattaacggtacatcaggttatgaggaagcagccgggcaaggaattatagcagggatcaacgcaggccgcaaagcgcttggaaaagaagaagtgatcctcagccgttccgatgcttatatcggtgtattgattgatgatttggtaacgaaaggaaccaatgaaccgtaccgtctgctgacttcacgggcggaatacagactgctgctccgtcacgacaacgcggatcttcgtctgacggaaatcggccacgatatcggcttaatttctgatgagcgctatgaagcgtttgagaagaaaaaagcggcgatcgaggcggagaaaaaacgtctctggtctgttattatcaagccgtctcctgagaatcaggaatatatccgttcactcggcggaagcgagctgaaagacggagtgcgcggcacagatttaatgaaacgtccggaaatgaactatgaaacagtgacaaaacttgcgcctgcagattctccggttccgcaagatgtggcggaacaagtggaaattcaggtgaaatatgaaggatatatcgaaaaatccttgcagcaagtggaaaagctgaagaaaatggaaaacaaaaaaatccctgatcggattgattatgacgccattaaaggaattgctactgaagcccgtcaaaagctgaaagaagtgcgtcctttatcagttgctcaagcgtcccgtatttccggcgtcaatccggcagacatttcaatcctgctggtatacctggagcagggccgtattgccaaggtagctgaatagaaaggatgacggcatgaatatagaggaatttacatccagtttagcggagaaagggatttccctttctgaccgccagctggagcaattcgagttgtattaccggatgctcgtggaatggaacgaaaaaatgaatctgacatccatcactgagaaaaaggaagtttatctcaagcatttttatgattcgataacggcggcattttatattgattttgaaaaggtcaccactctttgtgatgtcggcgccggcgccggttttccaagcctgcccatcaaaatctgcttcccgcatctgcatgtcaccatcgtcgattcactgaataagcggattacgtttttggaaactctctctgatgctttacaattagagcatacgacatttgtccatgacagagcggagacattcggacaacggaaagacgtacgggaaagcttcgatctcgtgacggcccgtgcggtggcgcgtctgtcggtcctgagtgagctttgtctgccgctggccaagaaaaacggcgtatttgcggcactaaaagcagcagcagctgatgaagagctgaaagcggggcaaaaggcgattaaagtattgggaggagagcttgaacaagttcattcctttacacttcctgttgaagaaagtgaacggaacatcatgatcattcgcaagacgaaaagcactccgaaaaaatatccgagaaaaccgggtactccaaataaatcgccaattgaagggtaatttagacagcctgatgtgacaattccatcatattttctgcaaaattgatgaagatacagcaggaaaaaccatgagaaaatagaattataaaaatggcagtttttaaaggtggtgtaggtacatgaagcattcattctctcgtttcttcgggtttggtgagaaggaagaggaaccggagatagctgagcatgatacaaacaaagaagagatactcgaaataccggtacatgctatcgttcccaaccgttttcagccacgcaccattttctcagatgaaaaaatcaaagagttagcaatgactatccatacacacggcatcattcagccgattgttgtcagacatacagaagatgaaggacaatatgagctcattgcgggtgaaaggcgctggagagcggtacagacgcttgaatgggagaagattcccgcaattattaaagatttttctgatacggaaacagcatctgtcgctttgattgaaaacctgcaaagggaagaattgtcctccattgaggaagctcatgcgtacgcaaggctgttagaacttcatgatttaacacaggaagccttggcgcagcgcttaggaaaaggccagtcaacgattgcgaacaagctccgattgttaaagctcccggaacccgtccaggatgcgattatggagaaaaaaattacggaacgtcatgcaagagcactgattccgctcaaacagccggagtttcaggtcacattgcttgcggaaatcattgagaaaagcttaaacgttaagcagacggaagacagagtggtgaaaatgcttgaacagaataaggagaaaccaaagccgagacgcaaagcgttcagcagggatacaagaattgcgatgaatacgattcgtcagtcactgtctatggtagaagacagcggcgtcaggctgaacactgaagaagaagaattcgaagagtacatccagcttaccattcggatacctaaataaaaactctcctgatcagcaggggagtttttattttaatcaaaaaactattttgagataatgatagatttattgtgcactatacattatatatgtaaaattttatctttttgtgtcgtgaattgtctttttacagtcaaaaaagtcactttatcggagaacttatattagaaagtgtctttttcgtttacatttttttcacttgctgataaacaaattatgaaaaaaataaaacgctttactctttttttgataagatagaaacaagacagtacatgttcatgtgaaggtaggtgacatcgtgggaaaaatcatagcaattacgaaccaaaaaggcggagtcgggaagacgacgacttctgttaatctgggggcttgcttggcttacataggtaaaagggttcttcttgttgatattgatccgcagggcaatgcaacgagcggattagggattgaaaaagccgatgtggatcattgtgtgtacgacattttagtagatgatgcagatgttacagatattattaaaccgacttcagtagagaacttagatgtcattccggccacgatccagcttgcgggagcggaaatcgaattggttccgacgatctcacgggaggtcaggctgaaaagagcattagaatcagtgaaacaaaattacgattacatgattattgattgtcctccgtctctcgggttattaacgattaatgcgcttaccgcttcagattcagtcgttatcccggttcagtgcgaatactacgctcttgaaggattgagtcaattattaaatacagttcggcttgtgcaaaaacatttaaataccgacttaatgatagaaggagtgcttctgacgatgcttgatgccagaacgaatctcggcattcaagtgatagaagaggtaaagaaatactttagagataaagtgtatcaaaccattattcctcgaaatgtccgtttaagtgaggcgccgagtcacggcaagccgatcatattatacgatccgcgttcgagaggtgcggaagtatatttagatttagcaaaggaagtggcagcgaatggctaaaggcgggctcggaaaagggattaacgcgttgtttaatcaggttgatttgtctgaagagacagtggaagagattaaaatcagtgatttgcgccccaatccttatcagccaagaaaacaatttgacgatgagtcattagctgaactgaaggaatccatcattcagcatggcattcttcagcccattatcgtgagaaaatcattgaagggctatgatattgtagccggcgaacgccgttaccgcgccgcaaaacttgccggtaaagagacagtgccggccatcgtgcgggatttatctgaatcgctgatgcgggaaatcgctcttttggaaaaccttcagcgtgaagacttatcaccgcttgaagaagctctggcatatgactcactgctgaagcatttggatttaacccaggaacagctcgctaaacggctcggaaaaagcaggcctcatattgccaaccatttaagactgctgacgctgccggaaagcatccagaacctcattgcagaaggtacgttatccatgggacacggcagaaccttgcttggtttgaaaaataaaaacaagcttgaaccgcttgtgaagaaagtggttgaagaacagctgaacgtccgtcagcttgagcagctgattcagcagttaaacaacaatgttccacgtgaaacaaagaaaaaagaacctgtccaagatgtggtgttaaaagagcgggaatcgtatttgcaaaattacttcggaacaacagtaaatattaagagacaaaagaaaaaagggaagattgagattgagtttttctcaaatgaagatcttgaacgtatcctagaactattgtctgaaagagaagcgtaaaaaccatctttttaaaaaaagatggttttttatatacgtcttgtcagcttatgaaatggactgagccgttcctgccggccttctgatttatctgtcagctgtaacccctctgctaaaacatttgccatgctcataacaagatgaagcctcgtattctgcaggacaaaatactccataaacccgctgacattgacgattccattgatatggacgtcaccgatttcaggaagatctttttgaacacctgctccgggcttcagcggcccatcgccgatttgaaatgaccctacgcttttgacgcggcctaaacaagcatcaaccgctataataaacggatttttatgtagatgttgaatatctttcagcttgtctttcatattgacggcgtgaacaggatctgacagcgtgccgtaaacgtgcaatctgcctaaattcattttttctaactttgttcctacgagcggacctaatgaatctccggtcgaccgatctgtgccgatacacacggtgactaacggtctgccggctgctttacgtaaagatgaagtaaggatcgcttgtatttgattcgcagcagaagaatccgtatgagatacatattgttttgcccgttcttgagaaaaaagcccgccttttcgattcataaggttcacttccttgtcatgtcatacgagtattacattgttgtttttggtgatgtatggttgtttacagtatatccagcgctgcctttttttatgcttatgtcatgatcagcatgccggttgtttgaaaagagcgggatagaaaaaagaacccagagcagttattctctaagttcatgaaagaaataagaccatttgatctacatcaacatattgctgatgatccaatttcagcgctcttttttctgtagagaagaggataaatcctaactgagcgtagagttttattgcgggttcatttgttgaggtaacagagagatggagctgttctgtgtccttcatcttttttgctcggctgatggcttccgtcattaacgcttttcccgcgcctgaccctcggtgtttgggggaaatatacatagaaccgataaccgcaatgtgtcttagtttaaacagcggatgcttggagatcttgaggattcctatcagtctgtctttttcaaaggcgccaagcacgatggcattgtcggcttcaagcctggctttaaatttttcggacggccattctttctcctcatcatagctgacggcaaatgcgtccgggtgatcttttaaagctttgagcctgatatcggtataaggctgggtatcatttgcggttaaacgcctgatgtacatggtttgagctccttgcataagtgaatttttctgaatagtcaatcgtcgatatcataccatatttgtcccatttgtatgaatgattgccgctgtcactcaatatagtagcaatatgcggagatgatctgaaattttatgaggtgatgagggtgtggagagccgggatgaagtggatgctgctcatattaagcagccagattggggctgggtatgcaagcgggcaggaaatatggcagtttttcggtgtcgaaagcggactggctattgtattgtttacagtcatgtttacgatttcggcttatattgtgttgaagatcagctatcgggttcaatcaacgcactttttacctgtgcttgagcatctgatggggccggctcttgctaaagtctatgatgtgcttattatgttttatttgttttcaatgacgatggttatgattgccggcggcggtgtgacgctgcaaatgtacaagctgccgttttggatcggtatttttcttctttgcattgtgaccgtcggtttattcttttgggatataaaaggaatattatctctgaatagtattttgataccgattcttgtagcggggctgttatatgcattggtcttttttcagacaacccatcattacacgtggacgatagatttgacccgccagtataattggccggcaagcattaccttcacgtctttaaacatcctttctgttgtcgctgttctttcttcaatcggaaaagatatgaagggactgggagaagcgaaaatcgcaagcgttgcaagcgggctgattttcggtatgatttcatttgtttacaatgaaacgcttgtacagctttcgggcagtcttacacaatatgagattcctcttttcgctgtccttgaaggcgctccttatccgttatttctttgtatggccgccgtgctttttttagccatctatacgacaaccgtgaccggtctgttcgggctgtccagccgcatgcttgcatttgtgaaattgccgagatggacgctcgtatctcttcttttagctgtgatggtgccttttacgacaatcggtttttcagatttgatcgccattttatatcccatttacgggcttttaagtctttatttgctggtatgtcttcttctttaccctattttagggagatggaaaaaagtataatgctcattttgagtgcggccgttgctcttatcctgtttttttttgtacaataaataaagcagtctatggagagaggtgaagggtcttggcggataaagactttggcctgaatgatattgttgaaatgaagaaaccgcatccttgcggtgaaaacaggtggaaaatcattcggatgggaatggatattcggattaaatgcacgggttgttcccacagtgtcatgattccgagaagagattttgagagaaagctgaaaaaagtactcgtcaagcatgaggagcctacatcataagggctggcgctcatgctttttcatatagaggagaggaagaggcccgatgagcaaagtgcatcagtcagcgtgcccgctgaattgctgggacagctgcggctttttggtgacagttgaggatggaaaggtgacgaaagtagacggagacccgaatcatcccattacggaagggaaaatttgcggccgtggcagaatgctggaggcgaaaacgaatgcgccggaacggcttcgttttcctttaaaaaagatagacggcgaatttgtccgcatttcctgggagcaggcgttagatgaaattgctgaaaaaatggcggtgattaaggagacgttgggcactgccgcagtgctgcacagtcatgattacgccaataacggtcttttgaaggcgctcgaccagcgttttttcaatggatacggcggtgtgacggagattgcgggcagcatttgctggggttccggcattgaagcgcagcgctgggatttcgggcgttcttacgggcatggaccgcttgatatttatcacagcaagcatgtgatcgtatggggcagaaacgtgtcccggacgaatatgcacctctatcatcatctgcagcaggtgaagaaaaaaggagcgacactgacggtcattgatcctatttttaacccgactgccaagcttgccgatcggtatatatctgtcaaacctggcatggatggctggcttgcggcgggtgttttaaaaatattatgccaaaccggcagaaccgattccgatttcattcaaaggcattcggtcggttttgaagaaatagaaaagcttctgcagacgatttctattgaggagatcattgagaaaacagaaacgtctttagaagtgcttgaatatcttgctgatttatatgctgacggtcccgcctccacttttatgggtcttgggatgcagagatataaaaacgggggcgggacgatacggtggattgacgctttagctgcggcgagcggaaatgtcggtatcaaaggcggcggcgcaaacttcggaaatgtgcaagtcggtgaaagctttgcaaaggccgagctcacccgtcctgatctgaagaaaagttcgagaacgttttcgatgatgactcaagccgaagaggcgctgaatgcagccgatccgccgattgagatgatcatcgtgacgtgcggcaatccgctgacacaggtgccgaatacaaaaaaagtgaaggaagcatttgaaaaaacaccgatcacagtggccattgattcggtcatgaccgatacggcgaagctctgtgactatgtgctgccgacagccgttgttttcgaagaggaagatatttattattccagcatgtatcatcactatgttcaatatggcaagaagcttgcggaaccgcagggagaggcaaaatcagaccgctggatctggacggaactcgcaaagcgtctcggattcggggagctctttgattacagtacggaagatttcttaaaaatggggctctcttctttggagaaagaaggaatcacccttgagcaattaaaggaaaaaggacatatgccgcttccggtcaaacaggttccgtggagtgattttcaatttttaaccccgagcggaaaatttgaattcgtctcgtcactggcagaagagaaaggatacagcggcctccctcaattggaggtgccggaggagtctgtttatcatgacgccggactggccgggaaatatccgtatacgctgctgtccattcacccgcagcgctccaatcattcacagcacgtgccgtttattgaaaagcttcagcagattcaggtggatctgtcgccggatatcgccgaggagctttcacttcaagacggagatacggcagaggtatacaatgaccgcggccgtctgcgcggcagggtgaaaatcatgaagcaggctcacccgaagacggtgaatatagatgaaggcatgtgggcggcattcggaggctccgtcaacatgctcacaaaggattcaaattccgataatggaatgggaagtacgctttttgactgtctggtagcggttaaaaaaggataatctaaggagagagagggcgggaaatgcttttttctcagcttgtcttttcctatgaacctccttataattgctctaggtttacaatacgtttatacgatgatggtttgatatagaggagatgaaagaatggctttaactgctggaattgtcggtttgccgaatgtcggaaaatcgacgttatttaatgcaattacccaggctggtgccgaatcagccaactacccgttctgtacaattgatccgaacgtgggaatcgtggaagtgccggatgaacgtctgcaaaagctgactgaattggtgaacccgaaaaaaacggtgccgactgcgtttgaattcactgatatcgcggggatcgtaaaaggcgcatcaaaaggtgaaggactcggaaataagtttctttctcatatccgtcaggtagatgcgatctgccacgttgtacgcgcattcgctgatgacaatattacgcacgtgtcagggaaagtcgatccgattgacgatattgaaacgatcaatcttgaattgattcttgccgacatggagacagtcgaaaaacgcatcacgcgtgtaagcaagcttgctaagcaaaaagacaaagaagcggtttttgaatttgacattctgtctaaattaaaagaagctttcgaacaagaaaagcctgcccgttccgttgaatttacggaagaacagcaaaagcttgtgaagcagcttcatttgcttacgtcaaaacccgtgctttatgtagcaaatgtaagcgaggatgaagtggctgatccttcagataatgaatatgttgcgaaaatccgggagtacgccgcgggtgaaaacgccgaagttatcgtcgtctgcgcgaaaattgagtctgaaattgctgaattggaaggcgaagaaaaacaaatgttccttgaggagctcggcatcgaagaatcaggtcttgatcagctgattaaagcgtcatactctcttctcggccttgcgacatactttacggcgggcgaacaggaagtgcgcgcatggacattcagaaaaggcatgaaagctcctgagtgtgcgggtatcatccacactgactttgaacgcggctttatccgcgctgaaacggttgcttatgaagaccttttggcaggcggcggaatgtccggagcgaaagaagccggaaaagtgcgtctggaaggtaaggaatatgtagtccaagacggagatgtcattcatttccgatttaatgtataggacacagttgtaaagggacaagagctttggtataatataaacttgtgagtaatagaattattgctccttgcccattatagggccgcttagaccaaaaggaggtgcaaacagatgaaaaagtacgaagttatgtacattatccgtccgaacattgacgaagagtcaaagaaggcagttatcgagcgtttcaacaacgtattgacttctaacggagcggagatcactggaacaaaagattggggtaaacgtcgtcttgcttacgaaatcaacgatttccgtgacggtttctaccaaatcttaaacgttcagtctgaagctgcagcggttgctgaattcgaccgtttagctaagatcagtgacgatatcattcgccacatcgttgttaaagaagaagaataagcaatttgaaatatataatgttaaaaggtggtctttcatatgcttaaccgagttgtattagtcggaagactgacaaaagacccagagcttcgttatacgccaagcggtgcggctgtcgccacgtttactcttgctgtgaatcgtacattcacgaaccagtccggagaacgtgaagccgatttcattaattgtgtcacttggagaagacaagccgaaaacgttgcaaactttcttaaaaaaggaagccttgccggcgtagacggccgactccagacaagaaattatgaaaatcagcagggacagcgtgtcttcgtgacagaagtccaagctgaaagtgttcaatttcttgagcctaaaaacagcggcggttctggatcaggcggatacaacgaaggaaacagcggcggaggccaatactttggcggaggccaaaatgataatccgttcggcggaaatcagaacaaccagagacgaaatcaagggaacagctttaatgatgatccatttgccaacgacggcaagccgattgacatctcggatgatgatcttccgttctaatagattatcgctatattcataacgagaaaggtgggaaatgacaatggcaggaggacgcagaggcggtcgtgcgaaacgccgtaaggtttgttacttcacttctaacggcattacgcacatcgattacaaagatgtagatcttcttagaaagtttgtttctgagcgtggtaaaatcttacctcgccgtgtaactggaacaaacgcgaaataccaacgtaaattgactatcgcgatcaaacgcgcacgtcaaatggctttacttccatacgtaactggcgagtaagccgaaaaaagagcaagagcctgcgggctcctgctctttttttatatcagtccccctccatcctgccgaaatgtttcacatgaaacatggaagtgcttcttacacctttgttatcttgctcctctattcaaaaacgcgtacttatgcaatgaatttgtttatactgaaaaacagggggtggctgagatggagacagacagaaatatcctgactgatgaaaagtggagcgcaatcatacataatgatgcttcttatgacggggcattttattatgcagtaaaaacgacggggattttctgccggccttcttgtaaatcgagagttccgaatagagaaaacgtgctggtgtttgatacggctgatgcagcgctcgagaaacattttcgtccctgtaaaaggtgccggccgaacggtcttcgtcttcctgatgaagaatggattgctcaaatcattgaatacattgaacgccattatcacgaatccctgactctgagtgtactggccgaaatgtgtcacggcagcccctatcatttacagcggacatttaaaaaaatcaggggaatatccccgattgcgtatatacagaaaataagattgtcgaaggcggaacaccttttaaagcatactgatatgacagtcatggagatcgctctgactgtcggaattccaaacacagcgcatttcgcgaccctttttaaaaagggaaccgggagttcgcccacagaatacagaaaaacggccaaaatgggacagggaggttcaatatgagtaaagagcctatgatctattggacactcttcacacggaatgattggagcctgtatacagccgccacatctaaggggctttgctttatagggtcaaatcatggaagctttgaagagcttgagcagtgggcaaaaaaatcactgccgcaataccgattggcacgtgatgatgaaaagctggcgccttacacggcagagttgtccgagtacattgaaaatggcagatcagctttttcagtgccggtggatctttacggaacagaatttcagcttgctgtatggaaagcgcttatggacataccgtacggcgagatatactcctattcggatatagcaaaaatgattcagaaaccggcagccgtaagagccgtgggcgctgcgattggaaaaaatccggtattgattacggttccgtgccatcgcgtcatcggaaaaaacgggaaactgaccggattcagaggcggtttagaaatgaaaaagcagctgctggcattagagggcggaaacattgaaacactggaataccggctgagccggacaggagggatcacatgaaactgatttcttggaatgtaaacggcttgcgtgccgtgatgaaaaaaatagatatcaatacttacgttcaggaaacggcagcggatattctatgtctgcaagaaacaaaagtacaggacggacaagtatcattacagcctgaaggatatcacgcctattggaactatgcggtgaaaaaaggctactcaggcacggctgttttttcgaaagaaaagccgctgcgcgtgttctatggactggggattggcgatcatgatcaagaaggacgggtgatcacgcttgaatttgagaacgtgtttgtcgtcaactgttacacgccgaatgccaaacgcggattagagcgaattgattaccgtcttcaatgggaagccgattttaaggattatctgcagaagcttgaccggaagaagcccgtgatcttatgcggcgatctgaatgtcgcacacagggagatagacttaaaaaatccgaaagccaaccggaagaacgccggtttctcggagcaggagcgggaagcgttcagcgccctgctgaacgcgggatttaccgactcattccgctatttatatcctgatcgggaaggcgcctattcctggtggtcttacaggacgaacgcacgtgagaaaaacatcggttggcggcttgattacgtcattgtttcagacagactgaagcagcggatcagccaagcggccatttgtgccgatatcatgggttctgaccattgccctgttgaaatgacagtggatttatgatgagatagcagtaagagaaatccactcttgctgcttttttatcactgaaaatggaggagcacatggcaaatataaaagagattgcgaaactggcgaatgtgtcggtggccaccgtatcacgcgtattaaaccgacacccgtacgtatctgaggagaaaaggcgtcttgtgaatcaagtgatgaaggagctggattatacccctaatcgaaccgccattgatctgattcgcggaaagaccaatacaatcggcgtgattttgccgtacagtgaccatccctgctttgacaaaattgtaaacggtatcacgaaggaagcgtttgcccatgattacgtgacaacccttctccccaccaactatgaccccgctatagagatgacatatttcgaactgctgaaaatgaaaaagattgacggactgattgtcacgtcccgcgcgaatgaatgggagaccgccgtgccttacctgcaatacggtcccattgtcgcttgtgaatatacacagcatcaagagattccctgcgcttataatgacaggcaggcagcatacagagaaagctttttgtatttgaaaaaccgcgggcatcaagacgttgcttttacatgtgtgcgggaagcggaaaaaagcccgagtacggccgacaaggtaaccgcatataaggcggtcttcggctctcttgatgaaacccgcattctggtcggatgccatgatatggacgacggaaagcgtgcgggtgagcacttctggggtttcgacaaggcgccgacggccatctatgcgcacagtgatgacgtggctgccggcttgtaccagtttgcgaaagaacagaaatgggacgcggagatcatcggcgagggaaatctgagcgtcagccgggcattgaatattccatccctggaacttcatttggaacgggtcggaaaggaagcatttttattattttttcacgaagaaacagctaaaaaacaaattatgcatcaatttcagcggaaaaaagtcttgagctgaaatgggtttcatgctttataaatagattgagaaaaaaagggaggcggacatatgcgaattgaacatgcagcgatatgggtgaaagatttggaacgaatgaaagagttttatgagacatacttcggcgccaaggccaatgacctttatcataatgagaaaaaagatttcaaatcgtattttctttcatttgactccggatgcaggctggaacttatgaaaaaaggcggcattgatgaagttccgtcacagaatatgaccggatgggcgcatctcgcattttctacaggcagcaaggagcgggtgaatgaattgacggaaacgtttaaaaatgatggatttcaggttgtaagcggcccgcgcgtgacgggtgacggatattatgagagcgtgatagaggatggggaaggcaatttgatagaaatcacagtgtaacagtgcggagtgattccgcactgtttttttgattaaatttgctgtgcatttgttttcgggccgaagaggattaacaaaacggaacacagaagccagcagccgccgatgaacaaaaagacgctgatgtagccgagcttaacggcaataaacccgacgagcagggagccgaatatgttggaaaaacggccgagcccatacgccagcccgctcccggccgagcgatattccgtaggatacggttccgatgtgtaggcgtatagatttgaggtgaagatccgttccgtgacgttaacgacaaatccaaacacaataatcatgacgggaataaacgtcatgccgtataacagtccggcaatggcagtcagaaaggcgcttgctgccagaatccatttcctttggaacgtttcggatatcatggaaccgagcaatgcgccaagcggtgcgccgacagagtgaagcacattgtaccacagtgttttttccatggtgatgccgttgcttttcagcaggctgggcacccatgaagcaaagccgtaaaagccaaaggtttcaagaatccataccgctgacaggatgatggtgatctttaaattcctgccctgaaacagccctaagtagcctgcgcgcttcactgtatgtacttctgccgcctcttttggcgcgggaagcgggcctttttctttctctgcacgtgcttcaagacggttcataatggcgtttgcctgatcatatgcgccccgattttcgtgccagcgcggcgattcctcaagccggcggataaaaaagaaataaatgagaccggccgccccccatacgaatacgagccgccacccccatgagcttaaaggaatgacaaaagcggaaacaacgtttgtaacgggaacgccgattagcccgatcatggcgcaaagggagatgtattttccccgtacggaggatggaaaaaattctgccaaatagctgttcgtcacaatcatggcggccgcgacgccgagcccggtcaagaagcggaaaatcattaaggacggaatgtcccatgccagcgcattcagaaaagatgagatcgaaaagacaaggacaaaacaattcagcgcttttttcctgccgatccgatcggacagccttccgccgatggacgcgcctaaaaacatgcccaggaatgatgcggccgtgatgtcggcaatggtggacagcttcacgccccaatgctcaatcagcgccggagccacgttgctgagcgtaaacagatcagcgagatcaaaaaaatagatgattccgagagcggttaatacttgataatgcacacgtgaaatggggagacggtctaatcggttcgctacatttgagaatgtctgatgtttcataaacaaccccctgactttgcaattgtaatcagaaaatactgtgaatttatctgacgaatacattataaaggtctttttttggcaaaaacagagtgtaaataaccagagccaaaggaaacggcatagcgctttcttcttaaaatatataacatttcctatatctgtttttgtttatattgtaaaatgttgaaggaaaggaagttgatgcataaatatgaatacgtttgtacggcccgcagagggaaaaaatagtgtatcgagatatctcctttctctgttggtcattgtgggtttgttctttttcggaagcatactgaccgtgttttatatgtttctcacgtccgctttcaatccttcactgacgataaattgggatgagggggcattaagtgacccgctggcggatatttatttacagcatatcgtctatttcatagcgattccgggcatttggatagcggttcgtttcattatgaaacggcggtttttatccatcatcacaccaaatcagtcgctgaactggaagaggattttctttggattcggcacatatgttgtgctgatgtttgtcgcggggctgattgattttacaattcatccggatcgtttcatgcttcaggaattccatgcttcacgttttctgctgctgttagcggcggccgtcttgttggtgccgattcaaacctctgcggaggaatttctctttcgcggttttctgcttcagttcgccggaaaattgacggcaaatgcggtggttctgacagtcattatcggcggattattcggcgcacttcatttcgggaatccggagatggaaaatggagctctctgggcgggaatcggatatgtcaccatcggcatgatctggacctttatcacgattaaaacgggcagtctggagatgtcccttggcggtcacgctgccaataatatgtttttatttatctttctcacagaggatcattcggtgtacggcggcattccgtcgatatttacaacagcagccggcggctatgaaatatatgattgcatatcgactctggtgatcaatatcatcttcgtatggctcgcgttccgttttgtgaaaaaagaaaagcagcaggccgcctaggctctgctgctgatttgtaaggtgttcatcgcttcatcaatatccgtcgtcggcctccggcaggcgaaattctcacaaatgtagaccgttgtcttcccatcgatcatttgataacccgcggcaaagtcagaaatgccggcaagctcttccggatgttctgcggcgagaatcgtataggcgggagtgaaatgctcctgaagcgcctcaatgaaacgttttctgtccgggtcatctttccttccgaaaacaacgatttctttttggggcattgtatgtgccagtacgctttgcatgaagaaagcgttgctgctcggataggcctctatttcccgtttgaacacggaaaacatcgcttcggctttttcaatcagtgatatatcacccgtcaggcggccgagacgaagcagctgtacggcagtcgcgctgtttccggaaggcacggctccgtcataaacctctttttccctgacaagaagggtctcagcatcattccccgtaaagaagaaacctccgtgccgttcatcccagaacagctccagcatgcttgtacataacgttttcgctttctgcagataagacggattaaaacccgcttcatacagttcaaggtaagcccagatgagaaaagcgtaatcatcgataaaccctttgtttttcacttcgccctcgcgatagcggaccatgacgcgcccgtccggcatgaggtgccgttcgagaaagcggatcgctgtttccgccatgctgagaaagtcaggctcgtgaaatacctttgcggcttttgccagcccggcaatcatgagcgcgttccatgaggtcagcactttgtcatctgtatgcggatagcttctgttttcacgggcctccagcaattttgttcttgcctcttcaaggcgttcggccagctcatgtcctgtgaggccggtctcttcgaggatggcctcacgccgcgtaaaaatgaggtgcgggatgttttcgccttcaaaattgccttgatctgtgatgttatacaccttgcagtaaagcgggccgagttcatcaccgagaaggttcataatttcttttttggaccatatgtaatatttcccctcacggccttcggtatcagcgtctaaagctgagaaaaagctgccgtcttcatgcatcatttcccgctgaataaacgttacgatctgcatcgcaatctgtttgtagcgctcattacccgtgacttgataggcttccgtataggcggtcaggagaagggcgttgtcatacagcattttctcaaaatgcggcacgagccattcattatcagtcgagtagcgggcaaagccgaacccgatgtggtcaaaaatcccgccgttcgccatgccgtcgagtgtcttggttacgccggccaaagcctgttccttgcccgtatagctgtagtagcgaagcagaaacatgagcatatgcggcatcggaaattttggagcctggccgaacccgccgtacactgtatcaaacccgccggccagctggcgatacgtgtcatgaacagcctgttcgccaagcatgccctcggtcgggtgaaccttgacttcaagatgagcggcggcgttttcggcgatatcctcgacatgctgccggtcattcgcaaacgtttcggacagatgttcaagcacatcgataaagcccggacggttaaatttgctcgtcttcggaaaatatgtccccgcataaaacggcttctgatctggggtgacgaacacgttcagcggccacccgccctgccccgtcatcagctggcagattctcatatacacggaatccacatcaggccgctcctcacgatcaaccttgatggctatgaatttatcgtttaacataccggcgatctcttcgtcctcaaaggactcgtgggccattacgtggcaccagtgacacgtcgaatagccgatgctgacaagaaccggcttgttttcgcgttttgctttttcgaaggcttcttttccccaaggatgccagtttacggggttgtgggcgtgttggagcagatagggggacttctccgtgattaaactgttgggtttgctattgtttggcatgggctcacctgctttctattaatatttgtatgtttaacataccacaatcctctaaaaaaattcatacactcaactttgtgaaccaaacccaagtcattaaaaaggagaactgcttatgactctattttcagggttaaacttcatctaccttattgctttttagataagaagtaaggatttaaaatctttatcgttttatttactgttagataggtgaaacacactccggcgactgtaaccatcccgcctgtcagtgcaataaacgcaggtacttcacctaaccacacccaagaaatgaccaaggctatagcgggtgttaaataaagtgaaatggttgcttctgaagcaccgacgagtgaagttacataagcaagtgcaaagtaaggcacaaccgttggtaataaacctaagtaaacgatagacaatgttgagttcattgaagcgttcaaaaactcttcccctaagccaggcagaaatacaagcataggtactgtcccgccccaaatagtgaatgtaacgaatggaataaatccatatttttttatatagcgagcttgaaaaacgaaataaatactctccgaaaaagctgccagcaggattaacaaaatgccgttcactgaatttgtatagtttcctgccccaaatgaaatgatcgacacacccaataaacttatgatagagccaatccatttataaagcccaaaatgttcaccaaaaaacagacgagataacatggcagaaaaaataggtgtcatggtcacgagtaagcttgctgtccctgcgctaactgttttttctccgatattcagcaaaatgtgatatagtgcaaaacctaaaaatcctaacgataaaatagcagggatatccttcatgtcaggtaaacgcatatgagtcaaaacagcaaaaaccaacagtgccattgacccaatcaacaagcgaaacaaagcgaggtgttccggcgtgtaactctccaaacccgctcgaattcccgggaaagctgatgcccacaacccaatcatcagactgtaagatataccgattcgaactgttttcttttgcatctttctcactcctctttacaaaaaccaaccagttatttaatgtgtttctatattaataaagatttgatgatatgacttcaaccagttaaatagattttgacccaaccactttagtttttaaggaggatcctttttatgagcgctccagaagaaaaaaagatgaaaaagcttcctaagtacatacaaatcattcaatttataaaagagaaaataggaaatggagaatggccgattggaagtaagattccaagccagcgcacgcttgctaaacactttgaggtgaacaggagcacagtcattacagctttagaggaattgacggcggatggattaatcgaaggcagaatgggcaaagggacagttgttacgaacaatacatggacacttttggctaagaattccgcccccgattgggatcagtatgtaatctccggaatccagcagccaagccacaaaatcgttcaagagatcaataaatcagaatcaaattctgatcttatacagctcagtaaaggagaactttcacatgagatttttcctttagctgttatgaaagagatcatgggaaaggtatctcaaaacatagaggcattcggatatgaggaaccaaaaggatatttacctttgagagaggcattaagcggctatttaagaacaatcggcattcaagcgtctccttcttccattcttattgtttcgggcgcactgcaagccttgcagcttatatcaatggggcttttacaaaggggatcgaccgtatttctcgatcagccttcctatctttattcattacacgtatttcaatcagccggtatgaagctgactggagttcctatggataataatggacttttgccggaacacatccacatggcaaggggggaacgggggaggtctatcttatatacaaatccttgttttcataatccgacaggtattttaatgtcaaaaaagagacgagaagaaatccttgcggcaagtgagaatgcacagcttcccattattgaagatgacatttatcgtgagttatggatagatgagattcctccagatcctattaaaacaatagataaaaatgggcatgtgctttacataggcagtttatcgaaaacgttaagtccgggcttgaggattggatggatcgtcggtccagaaccagtgattgaacgtttatccgacataaaaatgcaaacagattacggctccagttcgttatctcagagagtagcggcagagtggtttacatccggtgaataccagcaacatctagaacaggtgagaagtcaattaaaggtgagaaggcaattggtcatgagtctcttagaaaccaatttgaagaatgtcgctgcatggaatatgccgaagggaggattctttgtctgggtaaaaatattgccttcactatctatgaaattactttatacaaaagctttgacaaaagggatacttctcaatctcggcagtatctatgctcaagaaaaagggaattatattcgcttatcatatgcttatgcatctcttgaagaccttcaaaagggaatttatgaattgggtttgatgattaaggaattggcaagcagataaatatataatgattactaaaagacagggacatgctatcaatgacaagaatctgcttgttttcgcgtttcgctttttcaaatgcttcttttcccctcatgaaaaccagtaaaaaagccgccaacaaagcggcttttcttaagttaagatgccgaatgtcaaaaaaatgttaatttctgctctccttgtttttattcaaacttcaatctgtatggctatgtctctcctagaagaacagcggcttggttcttgaagagtaaatcatttaatccaaagcgctatgactcctgcagatgaaattcagattattgggccgtataaccgccatccatcacgactgcttgccctgtaactcctttagctttgttactggcgaggaatactgcataatcagcgatttcttgtacgtctaataaacgtttttgaggaaccaagggataaatgacttcttcaaaaaccttttctatagaaatgcctctagtctctgcaatatcttttaactggttttgcaccaatggagtgtcgatatatcctgggcacaaggcgttgacggtaattccgtattccgctccttccaatgctgatactttagttaaaccgatcaaaccgtgtttagcgctgcaataagctgctttccctgcaaaaccaattaaaccatttatggaagccatattgatgatgcggccaaatttttgttttttcatcaaagggaatactctttttgtcgcactaaaaggagcagtaagcattaatttcagcataaattcaaacttatcagtcgggaagttttctatatccgacacatgctgaatccccgcattgtttaccagaatatccaatcgtccaaaggtttcaagtgtcttagagacacttttttctacttgttcttcgtttgttacatcacaaaccgcagagaggacatcgtatccttgttccgtaagttcctcagctgcatgttgcacggctttttcgttcaaatcggaaatcacaacttttgcgccttctttagcgaattcacgtgcaatttctaaaccaattccactcgccgcgcctgtaacaagagcaactttactttccaataatttactcatagtaacccctccaggattcattttggtctcctaaaagtttacacccagcagttgtataagtaaaatgaataaaaagaatataatgtattcgttaaacttatggaatggagatcatacgatggatatacgccaaatcacttactttcttgaagttgctaaatccaacagttttactaaggcatcagaaaatttgcatttgtcacagcctgccttaagtaagatggtgaaaagtttggaagaggaattaaaggttgagctcattgatcgatcaactagacaaatcgctttgacagatgcaggcgaaattgtatttgagcaaggccaaatgattatgaagtcaatagatgacttgtcgacgaacttatacgatcttttacatttaaaaaaaggaaaagtgaaaattggaataccgccgcttatcggtgttttgttttttcctaaaatcattagaggatttaaacaattgtatcctgatgtgaacatcaagctgatagaacatgggggaaacaaggtgaaacaggaggttgaagatggggtactggaccttggcgtggttattgagccagtggacgaagagcagtttgatatcattccattgcttaatgaagaactgatgctcttcgttcattccgctcacccgcttgttcataaagagattgtggaaatgcaagacttgaaaaatgaacctttcatcctgtttagtgaagacttttctcttcacgatcggattattcaagagtgtattagagccggttttcgtccaaatatcgtttatgaaagttctcaatgggattttatcagcgaaatgattggagaagaactaggtatttccattttccctcagtctatagtgaaaaagactgatcaaagtttagttaaggcaatttccattgtcaatccatcaattccttggaaagtggcgattattttaaaaaaaggtaaatatgtttcacacgcagtacgcgaatttatccggtatatttcatttttttgtaagagtaattacgcagatcaagataactcatgaaaaaaatgaatgatttttatagtttttatgtattttacggttagagagggctgcgatatattatcttatgtcagaaaataagtacttttcaggaggaaattcaaatggatcaaagccgttaccaacaaggtttagacaaattaatggagtacactttaacaagcgatgataaaatctctacgcatttaaagatttctgaagacttgaaagatatcgccccagatgtaagtaagtacatgatagaatttgcttatggagatatatattcacgaccgggattaaccaatcaacaacgtgcgcttgttaccatttcatcccttgtaacgcaaggaaccgagccgcagcttgaacttcatatcaatacagggcttacatccggattaacaccgactgagattgtagagagtatcacccaattggttccttatacaggattcccgcgtgtacttaatgctctttcagtggctaagaaggtgtttgcacaacgacatgtagaaaaccattgagaaataggaatgcgggatgaattagtacaaactcatcaatagattatacacaaaacgacagcctataaggctgttttttaatagtctcgcttatcataaaaaatgtctgtgccaggcctataataggtctcttttttgttttcggttgatcatatgtaaaagcgattatattaatcgctttttgatacttcgaaacatgctaagctttgacctctttatcagtaagcacttttaaagcatctctcacttttaaggcgaagttgacaggtttatcaatcgcttcgaaatgaatatacatcagtctcggtttatcaaacagccagtgattgtgaagtgacgttacaatcagatcatgtttccgaagaacgctgataaatggattgatttctttttgcagaatgacagtttctccgctgcaaagagcacggccgtcttttgtcattgattcaaatgaaaacatttgcggaatgagcaagaatgatcttccgggccgtccaagtactacaggttttatattcgttcgtgatctcattactgtacaaattccattttcaaacgtatgcatggttccgcctagaatatcgttgaactcgtcacaaagaccatgccgttcaatcatttccccgtcagtttttggtaccgcacgcacagttttagtagttagaaccctcagggcctctctcacttttcttgcaaaattgagaggtttatcaattgattcaaaatgcataaacatcaggcgcggtttatcaaacagccaatggttatgaacggcagttacgatgataccgaatttgcgcagctcactcattaacgggttcacttcttcttgcagtaaaacagtctcacctaaacataaagctctgccttcccgatccatgctttcaaatgaaaaggcctgaggaataaaaggaaatgcctcggctcttcttccgagtaccaccggatgaatgttgcttcgaaatcttgtcgccgtacatacgccgtttacgacactgggcgttgaattgagaattctagcaaattctttgcagagccgtgatggctccatactcgtttcttccacttcatatctcctcctggaatctatttataacgtacgtagtattaaagatatgtgaagatagaaaaaatgtaacgcgtcagcagtccatattagagagaatcagccttccttgtataatttgagattttcttccctttttataatctctttaactgttaatttttaatagattaaaagcttaaattggtagttttattccagctttaatttttttgtggcggccatttgtgacaagcaccggctgagcacacatcccttttaatttgagtttcaggctaagaaaaaaagcctttatacaaggctttcggtaaataattcatatacagccgtttggctgctcattcagtgacagctcacagctcttttgtcatcaagacatgcgggatgccgtcttccataaattccggtgaatctgtctgatagcccagtttgtgataaaagccttccgcatgtgtttgtccatgcagtttacattgggtgatgcctttttcttttaccatgttttctaattcgcttatgatgactttgcccaacccgtatttacggtaaggcttcaggatgcagattcgttcgagcttgcctgtatggtttacaatgcggacgcgtcctgtgccggcaggctgattttcatgataaaccaagacatgcccgcactgttcctgaagcgtatcgaactgatcaaattcatcggattcaggtacttgctgttcctcaatgaatactgcttttctaatctcaagcgctgcttgcaaaccaatttccgttgttattctttttatcctcatgatcaatcaatccttttcacatattagtctggactgcacggcttgcttgtggtcttatagaagtaacgataaaacaattatattgcatatgcaacaaaaacatgaagggtttgaaaagatatgactgatattttgcgggaaatcggcatgatcgcacgggcactggattccatcagcaatattgaatttaaagaattagacttaacaaaagggcagtatctctaccttgtgcgtatatgtgaaaacccgggagtgatacaggaaaaagtggcggaaatgattaaagtcgaccgaacaacagcggcgagagcaatcaaaaaattggaaatacaagggtttattgaaaagcgtcctgatgatcaaaataaaaaaataaaaaaactgtttccgactgaaaaagggagaaaggtttatccgttattgcaaagagaaggagagcattctgcggaggtagccctgtccggctttacatctgaggaaaaagaaaccattttcagccttcttcagcgggtgagaaaaaatatagaacatgattgggaatttgtgaagaaggggaataaaagagattattaatggtcattaattccttttagtgaatgattgcgttgtgaatgattaaagtcataaatggatacgttatctgtgacatctccttcctcggttcctgcttcaacatagccgataggcttatttttaacgaaaagtatcaattatggtatatttaaataagaaaaataattgaagcggggaatgatatgagtacaatcgaaaaacaaagacgtaagaaattcagagcgaaatcaatcgtacgggccatcatggtcatcatcggcggaattattgccgcgtatggactggaaaccgtattgattccgaatagtgtatctgacggcggtgtgaccggactcagcattgtcggttcacagctgtttcatttgcctcttgggatcttaattgcggtgatcaatataccgtttgtctggttaggatataagcaaatcgggaaaggttttgcgtttctatcaattatcggtattgtctcacttgccgcgggcacgagttttttccaccacacaccggctatcatcgagggagacaccctgttaatcaccgttgtcggcgggattattctcggctttggaatgggattggcattgcgcaacggcggcgcattagatggaattgatatgctggctgtgcttctgtcacggaaattgccgtttggcacgagcgacctcattttatttttaaacatgtttgtgtttatttttgtttcttttgtatttgggctgcaaggcgcattgctttccgtcattgcttactacattgcatctaaggtgattcatgtggttgaggaaggcttaagcggttctaaaacatttcagattatcaccaatgagcctgcattaatggtagagaccattcgtgaagaattgggccggagcgctacttataaagaagcatacggcggtttttctcatgaaaaattccaagaaatcacatgtgtcatcaaccgtttggaagaaaccaaactgaaagaaattattaatgacattgataaacaagcctttgtgacggtatatgatgtcgcagaagtaaaaggcagtaatttcagaaaagtccataatcattaagaagcgagctgccgttaatcggcagcttttttaaaaaaggagaaaaaacttgcaaaaatagaatgacggctgtatattattgatatatcaaacattgactagtcaattaattgcgcaaaagaaagtggggatgggttttgacagcatgttgttcagaggaaggcgagattttatatcagctccaatcactgcataaagtgatcggcacgaagtttgaagcgtgcaccggaatcagccaatcccgccttgagcttctcgccgtgcttttttacgtcgatgagatcagccaaagcgatcttcagaaaaaggtgaatattgatggcgcagccgtgacaagacacttgaaacagcttgaagccaaagaaatggtcacaagaaggcggaagcccgaggacaaccgaattatacttgtccggcttactgaacaggggcgggagagaatcgaggcttccaaaaaggagaaggagcgtttcataaaggaaatgcttgccggtgtcagcgcggaagaacgcagtatgttaaaaaacgtattgtcacagatgcagaataatatagaaaatatgaaagcataggagtgttttacacatgaaaacagaactgaaaacaaacgactttatggacattatgaaaggccgccgttccattcggaattacgatccggccgtaaaaatcagcaaagaagaaatgactcaaatcctggaagaagcaacgacagcaccgtcttcagtcaacgcgcagccgtggcgttttctcgtcattgacagccctgaaggaaaagaaaaactcgcgccgcttgcaagctttaaccaaacacaagtcagcacatcatctgcggtgatcgcggttttcgcagatatgaacagtgatgactatttagaagaaatttattcaaaagcggtcgaactgggctacatgccgcaggaagtaaaagacagacaaatcgctgcgttgacggcacactttgaaaaactgccggagcaagtgaaccgtgaaacgattctgattgacggaggactcgtttccatgcagctgatgcttacggcgcgcgcgcacggctatgacacaaacccgatcggcggctacgataaagaaaagattgccgaggttttcggaatggataaagagcgttatgtaccggtcatgctgttatcaatcggaaaagcggcagacgaaggatatgcttcctaccgtcttcctatcgaaacaatcgcacaatggaaataaggttgaagtgaagctgaggggagagggacagtggagattattgcagctgttttcgtcggagttgtagctttagaacatgtatttatcatgatacttgaaatgttttttatcaattcgaaggcagctaagcggtccttcaaattgccgaagcatttagaaggtgatcggaatgtagcggtcatgtttgcaaatcagggtctgtataatggatttctggctgccggcctcatttgggggctgatcctcggagctgatccgattggccatatgattcaattatttttcgttatttgtgtggtcatcgcggcctttttcggaggctttacttcaaacaaatcaattatcgtaaaacaaggacttccggctgttttagcgcttatttttcttttattggcgtagcagacggaaagagggcttccggaaaggaagccctctttttttattctgttttgaaaaacagtttcggccgcttattcttgagatgataggttaatttgaaagccgatgcctgtgcgcatcggctttttttcggctgatagaaatacattatggtatataaaacaaaaagggaaactgctcacagaatcgaaataaatattattcgcactaaggaaaggtgtaaatctatgagcaaaatcgaagtgaatactccgccaaaactaaatcatcagtttctggccggaatgttgtttatgattgttggtacgctgtgttttgcctcaaagtcgatctttattaagtgggcttactcattcggagccactccggagtcaacgctatttttcaggcaagtgattgcaacccctcttttttgcatcatttttcttatatatcgtgcaaaattatccgaaaaaacggcaaaggctgatatagtcagagcgggaatcacgggtctgctcgttttttttctatctccgctgttggactttatcgggctgcattatgtttcagctattgtagaaaggatgctcgttatgagttatccgatttttgtcatgattatctcgtttttcggtaaaatggagaaaataaccgctgcagacatcatttctgtcgttgtggtcagcataggaatctttttttccattggcggctggaatctgcacgaattgagtgcgaatatatttggcgcttttctcgttcttctgtcgtccgcggtttacggactttatttggtcttatccggtcagcttgttcgcaaagtaggcagtatccgtatgaatgcatatgggatgtccttagcaagcattgccatggtgctttttttaatcgcaagaaagggctttggctatcagacagagctatggtcgtttcagccaaccgtatatttcctttttttaatcattgctgtatttacaacagtcgttccttttttatttatgctggaaggtatcaaacggattggggcagtaagagggtctttgatttcaatgatgggcccgatcatcacaatcatctttggcgctttcttcttgggcgagcatttaacatggatacagtggattggctgtttcattgtccttagcatgattactttttcggaaggcaggaagatcaaactaaaggtgagagcctgacatacgaaagccttccatataaggagagaaagtaaacgaaaaaataagccgatgcctgcgcgcatcggctttggggagtgaagttgcagaagatgaatatgaagagggcatattacgctattttatacagccagaccgctatcaacttggggttctcactttatacgatggctgtcatcttgtttttgtttacaaaaaccggttcgacggcgatggcctctcttatgacgttcgtcagcattgtatgtcgcgtattgggcagcgccattttgccgctggtcaccggccggttcacgcttcggtctttgttaatcggttctcaattgatacagatcacactgttagtctgtttgttttttgtcatccaaaccggttcatccgcattcttttttctgatgttttgtctgatcggaggcatttctttttgcaacggatggtttgctccgataaaaagcgcgctgattggggaaatcattcctcctgatcgaagggcgaaagcgaacggtttattatctgcggcggatcagaccgttcagtttgcggggtggtctctgggcggcgtcatcatagcgttcttgggagagagcgatacaatgatcgtcactgtcatgttattggtttcttcggttttgggcatcattctgtttcttcaagtacgcttgtgtgcgccggcagcagtcagggaacgttccctttttgcagatgcggcaagcggctgggtgtatttatttcagcaaaaacagctcagggttctcattgtgatggatgtgatcgaatcgtgggcaggcatgatatggattgggtctgtgtccttgacttatgtgcatgacgtccttcataaaggagaggcttggtgggggtatgtcaacggagtctattatgcagggacgatgatcggcggactgatcatctataagttatccggtaagtttcagcatcatctcattccgcttatgctgacgggagccttggcatatggaatgttcacgtttatttacgggctgatcacaagcgccgttacggccctttttctggtgctgtgtatggggccggcttgtgtattacgagatctcacgcaggaaacattccttcaaaacatcacgaccgaaaagacacgggtcaatatactagcggcgagatcagctttagttcagttcatttttatgttttccattatcggaacgggggtcatctcggatgtattcggcgtgcggtttatttatattggcgcaggcctcctcttattaatttcggcttttatcggattttctcagctgcgaatgaagaagatggtacaaagccgcatgtagtgtagtataatgaggaacgtacgttctataccgagagaggagagggttttgtgggacatctggcactgcaattgtacgattatcatatttgggcaaatcagcaaatattcacccggcttaaagagcttccggaggatgtgtaccgtaaggagattcagagtgtctttccgtcgatagccggtgtattgactcatgtgtatctgtcggataaggggtggtttgatgtgttctccggagagcgtctggaggatacgctgaaatcagctgaacagcaaaaagaggacatcttgtctaaagagatagaagagctggaagatatgtttttggaattatcagaccgatatcaattatttttgcaaaaggaagaaaatatcagtctccctcttgaaatagagcatccgtcaggtgacatcatgaaaaccgcagcggccgatatgatcctccatgttgtgaaccacggaacgtatcatcgcgggaatataacagccatgctcagacagatggggtatgcttctgtgccgacggattacggtatgtatttatatataaacaataagtaaacaagacagccaacgcggctgtcttgtgatatccgtaaaaaagccaaatcatatgagtgatttggctttttcatttgctatgccatgttctgcagccgttctaaactgtttttccaattcgcttcaagcgctgtaaaagcagcggcggcatcttgctgttctaatgcgtgaatgatatcagagtgttcattatatgatctgtttaaagcgccgttttcactgaaatagcggatttccattctctgaattttgactttcaggcttactagcaatttgtgaagttcggcgttgtccgcaagcagaatgatgcgatggtgaaatgcattgtccgcttccaggatggccagtttatcgccgtctttcattgtttgaagaagattttcattcagctgtttcaattcctgaatcacggcatcgtccacatgcgggagagcttgctgcaatgcgagtttttcaagcgtccagacgatggaatacaagttttccgcttcttttaactcaatcggagcgacaagcgtccatctgttcgcttttgttatcaccaagccgtcatcttccagccgcaataaggcttcccgtatcggggtgcggctgattcccaatgtttccgacaaatccttgtcctttaactttgtttccggtttgagcttgcccgttatgatccagtttctgagtgtgcgatacacttcgtcccgcatgatggttcttttcagcacaggttctttgttttgattatccaatggaacacctcatgaatcgtagtatacatatttgcattttaccacagtccgggcgctggttagaaatgaagagggacgtctaagaatgaatcgaaccgagatgcttcatctcaatatgctgaaagtcagcggagccgccttcagaaaagagcgtgattccctgatcttcgtgttttgggaacacttcatttgtcaaaacggtttttccgtcgtctgcaaatacttcaatacttgttttatccacgagaattttcagatggacgcgccctttgtttccgtcaaatggggctttgctttcggcgtatgcaccggttttatcaggctggtctgtaaacgatctgttcacataggcatagccgtcttctgccgaaataccgacatcaatatgccgactttggtctgctgattctctgagtctgacgcctgcatttttgatatctgaccaagcgatatccatatcaagctgatatgtatcacctttgatcggcagtgtctctgaaccgttcacctgtttgtgttctatgctgtcagttgaagaggttaattggttcaatgcttcaaccggctctgacacaaggctgtatgtgccgccgtcctgctgctgaaggcggatttcacggacgatagaatccgtaccgttaaagccgttttttagtgtcggtgtttcattcggataatcccaattgttcatccatgccagcgcatagcgttttgtcagcggatcttcgctattaccgtcctcaaatgtgacgccgccgtaccagtcaaagccgtaatcgagccattgcggttcttcttgatcggcggaaaattccttcccgtcaaagtttccggtccaatacgcgtacgtattcggtttgcctgcgggtttgccgtttgcgcttgcgcccagaacccacttggctgttccgtcatctgcacgcatcatataaaggtcggggcattcgacgaggccgatctgctgagtgataaaaccgcccgtgtatgtccaattttttaaatcgggtgattcataaaaaccgattttttcgccttcggccatggccatcacccatttgtcatcctgttcatcccagatcactttcgggtcccggaaatccttagttcccggatttttcatcacgggctgatcactataggaagtaaacgtttttcctttgtccgtgctgtaccataaatattgttcctgggcttttgttttggctgtcggctgcgttgtgacggcgaccagcgcgtttttgccgaagcccgcggtgttgtgtttatcaatgacgacagaaccggaccatatatcgccgttttcgttggtgtatttcggaatagccgtgccttcgtccgtccagtgcaccaagtcctctgatacggcgtgccgccattctgtgccgttgccgttcgggtaatcccgattataaagatagtagtaatgatatttcccctcgaaaaaaatgggcttttgagggtcgtttttccatttgtccggggtcgtaaaatgatacgccgcacggtaatctttcttatgctccgtgtttgtgtcagaggaattgtggcttttgttcggcagtaagccgacaaacaggaacgcacccaaaaagatcaatattacaacgggccattttcgtgccatgattgagttcaccatcttgttgagaaataaaagaaaatgccaatgaagtatcggcattttctttttgttgttattagttgttaaccgtaagctgtccttgttcaaggatgctgtttttaacaacggatgttttcttgcctttgatgttcattaagaagcttggcgcaaatgttgcctttttatcctcaaagaagcctctgtttgtcatgtagcttgtgatcacgacattgttgcctttggcttgcggcactgcgaagtgagagtaagtgaacgttacatcgttaggatcaagacccatttgcagtacaagaccagttttgttcagcggcttgtaaggacctgttaaagagtttgatacataaccaagcatgtagatatcgttggagttaataccgtcgatcgtcatttttgaaccgcgtgaatcagtgaacagataccatttgccgttcattttgaaaacattcgcgcgctcgatttcatcagttaccgtgtttgaagtgatcagcggcttcatgacttttttcaatgtgtagtcattgtttaattctacgatgccgagggcgccgttcgctaattcagcatcgcgttttttagcactttgctgaagcttctgactttctttacggaagaagtttgtgctgccgccgtagtacgctttgttaaataaagattcttcgccttggtatccgttatctgttcccgtgttggcttcgaatacaaggtatttatggcctttgtcttcaacgtagtgagggtctctcagcgtatggttgtcgccggatgtatagttcccttcatcgataaactgctgaacgttttgatatgtttttccgtcaccgtcaaaaatcgttttatgatcttccactccgttgatcttgagcgtgtcatcagattttgacacatttacctgcgccgttgtcaggctttgtttgccgtaatgtttaccggaaaagtcagtgtagaataaacggattttcccgtcagatgtaaaggttgcagaaccggaccattcttgtgtctgttctttcaggatttcatcgttggcgtcgaacttatcgctgtctttaaagacacggccagcgtttttccagctgtcgatcgagttgtcgccgactttttgataaaacatgtagatggatgtgtcatcagcgtctttcgggcttccggcaagagcaaacacgacgtgatagccgttgtattcagctactgttccgtcagcgttttggagcggccagctgtcccacacatccagtccttttgcggactcgatatttttaattgttgattggtcgaattgaggcacttggtatttttcactttgctgctgtttagggatctgcagcatatcatggcgtgtgatgtgagagacgccgtacgtttctttgtaaggtttttgggtattttctttcgcgaaggcttgagtcgctccccctgccagaagtgcagtcgtaaaagttagaactgtggctcgttttgcaaattttttgatgttcatgttcatgtctccttttgtatgtacctttttttgcgatctgccgattcgatcctcctgcattcatggatggcaggtttgttacagaaaaaaagacctaaaatatgtatggggtgacgccaaagaatacactttgcccttaacacattttaggtcttgcctgctttatcagtaacaatcctgcatgatttacttgtcgacatcattctattagactctgattctattgacaactggtctattttcctcttttggatgatagtaaaatgaaaaaaggccttttaatatatgggtaattgagactaaggggtgctctgggcctaggaaaaaacctctctaaaaaagagaggttattttttcttgatagataataaagcgatggtagctaaaatcagcaaagtacccagccattctgatattccgaagggaacatgcagccagatcacagctaaaaaagctgccgacagcggctctgcacaagcgagcaggctggtttcagaggcactcagatatttcaggctttccaagtagcaataaaaagcgatgagcgttccgaaaatgatgataaacacaatcgcggcatatgcaggaaaggaccactcgccttcaaatttccagggcgggcggatcaagctgagggcggctccgccgatcagcatgccccatccgacaataatggcagatccccatttcttcagcagacgatgcggctgaagggtgtaaaacgccagtgcaaacgccgaactgatgccccaaaagacggccagaccggatacggacaggcttccgacattcccgtgcgtgaccaaaatgaatgtgccggcaaccgccaataagacggcgagcagctcttttcctgaaggaattctctttgcgcgaatcgctaaaaagcatgtaatgatcgctggccctaaatactgaagaacggtagcagttgccgcgttgccgtactcaattgccgcgaagtaggtgtattgaacgcctaacattccgaaaatcccgaataaaagaaggggaattctgtcccgtctgtctttccaaacagcccatatccgtcctttttctttgcggtacgcgattccgagcagaagcgcccctgacaccagaaggcgcaccgaagtcagccattctgtattaaaatggcggtgctggaacagatactgggcaaccgttcccgagaccccccataagatagctcctgtaagcacaagccaaatgcctgttgttcgtgaataagaaagagcagcgtgtttttccaggatagacacccccgattctgatgttctgatattaacttacaataattaggaaaacgaactccttacatgtgatatattatatattgtatattaaattccgtcaaaaagattttcggagaaagctcttacaaaacggccgtctgaggaatgagctgtaaaaaaaacaccccggcgggtgggactgaccccataagatgagacaaataaaaacaccttcaagtttgaatacggatgattgttatccgaaattagacttggaggtgttttttctatggggacaagagtgagttatccggttgaagtgaaacagaaggctgtagaaatgagattggcaggcgtacctatgaaagagatcctgcaggagttgaatattaagaataagacacaggttcagacatgggttagatggtataaggctggtgatacacatcgattcgaacagcctgttggaaagcaatacacttacggaaaaggt

SEQ ID NO: 15 - DNA, 39833 bp, Bacillus methylotrophicus
gtatcaaaaagctgttaaaacaaaaggcattaccatgagcatgtcccgcaaagggacgcccgctgataatgcctccatcgaatcgtttcattcctcgctaaagtctgaaacgttctatcttaacagcattgatcgaactacgactgccatcgtagaacgcactgtcatagaatacattcattattataacaatattcgtattcaaaccaaactaaacaaccaatcaccgataaactatcggcaattggctgtttaaaaggtgttttgacccctgtctcaaaaacggggggcagtcccctggggcaaatgctctttattatttttcatgtacgcctgttttaacggctctgacatgatacataccgacatccgtcccaagcatataatcaggtttcggcttgccttggtttgctttgtgggccgcgatgtggtcttcgcttttttcccattgtttccaatggtcttctgactcccagcggattaacacgacgacttcttcatcaccgcggcggacttttttttccaggaccgttacgtctatcaaaccttcctgcttttcaatcacgccttctgaactgaagcgttcgattactttgtcggcatgtccttcttttacggtcatttttctgatttgcacaaacatctggcagctctccaatcattttcacgctttatccaacattttaaatgaaaatgattctcaaagtcaattaagatgcctgacggattacgatttcaggagaaagacatgaccatcctcatctttaaattgcacgaagctgccccagtccatttgtttcggttcatctaaaaaggtgatgccgttctttttcatctgttcgtatgcggcaaagacatcttcacactcaaatacgatagaagccttcatatgctcggcccctttcatcatcgctttcggataaataaccaaatgagtggcggctcctttgggcgctacctcaagccagaaggcgcccggtcccatcggatgctcggcgacggtttcaaaccctgctttttccgtccagaatgttttcgctttttgctgatcatcagtgtatacggcgactgtcgcgatttttttgatcatcatactgacctcctgtttcatttcttttatagtgtatcctcctgccgaaaaaagcaatcaacagctttaatgtgcaggtttttttaatttctctagtgcgatcggcgattccgatttataatttagacaaaagtacatattcttgaaagaggagacggcagtgaacaaagaccaattacttcatgattatattattacacattcggcagagctgacggaaaaatggctcaagctgagacggaagctgagagggcgtttttattctgcggatcaattaagtgaggaaatgaaacggctgctgatcgagcagcatacctttacaaacacggtcatcgcaagcgcttttttggaagatccggccgtttttcagcataacaaagaaaaatgggccgcacaggtagcgaaaagcagagtggagcaagacgcggaggttcatgaggtcgttgaggcgatcggcaattcaagaaccgtcttttgggaggcggtcacccgttttatggatgagcatcaggacatcgtaacaaacgaggatgcccgccgctggaatcaccttgtcaacggctcgtttgatcagctgatgacggattttactgaacagtttcagaaattaatgatcgcgaggctgtcatctcagcaggagcttatttccgaattgagctgtccggttattttgatcgcggatacgatcggcactctgccgctcatcggatcgattgatacgagacgggcacgcgtgattttggagtcggtgccggaaaactgtgtcgccaaacggatcacaaaccttgtgattgatctgtccggtgtgcccattgtcgatacgatggtggcgcagcaattgtatatgctgtcgaaaacgttatttctcctcggcatcagaaccgtgttttccggcattcggcctgatgtggcacagacctctatccaattggggcttgatttttcagagtatcaaacttacggctccctggagcaggcgctcgccagcatgggtgtcacatgtgtgatcgaggaagcaaaagcatagaaaaaagggtgctccgtccagaggcggggcgctttttttgtcagcggaaaacaatgtaaatatgtcggaacttgaagattgcattcttaaaaacagctatatgacgccttgggagtcgatttcgggatgacacggtttaaatcaaagcgaaggaagtgaaagttttcgcaaagaaaacatatccaaaaattgtgtaaatgttattgatttctgaatgaaaacataatagtataattatatatttcttatcagaatagtatgaattaaaacactcattgtcaaaagacgaacggccagacataaagggggagcatgatgacgtccaaaggaaacgtagatccgcatgtgatcgaaaagattatcagcgcgctggaaacgctcgatttcgggacagttcagattacggttcataattcccaagtgacacaaattgataaggtggagaaatatcgattttccctgaagagcaaagaagtaaaacaatcttaaaaaacagccaatgacaggaggcggtacatatgaagcattcaactgttcctttccgggagatccggtatctgcacctgcccgaagtgcgctttctgcattggtgcacgaagcaatacggcattaacaaaggcgtgctcaatacaattgacggctggttttatgatgcgggcgtcattccgattcccgtcaggcgtctttatgtgctggcatttctcgatttcgcgaaaacgccggggcagaaggggaatatccgattcgggcacggcggattgacgaaaaaactgcatgatttcatggatatgcaggagtgcgcagcaaaacgtcaggcctgacatccttaaaatcttcttaaaatcatgcaaatttctcccattttatttataatagacctatcaagatcatttttttgggaggacttttgacatgcaaactgctgcttatgagagcaaacaatctattatgcagcgcattataacggtatttgtgtttacactgttagttgcgacaatcggcctgtatacgggtcagttcattccgccggcattgatgctgccgctgtcgatcttagaggttgtcatgatcatcgccgcgttttggctgcgccgaaaaaaagccgtcggatatgtgtttgtcttttcattcgctttcatttccggaatgacgctgtttccgattatcagccattatgcgtccgcagcgggggcctatgtcgtattggaggcattcggttcatcgtttgtaatttttgcggtgctcggcacgatcggcgctaagacgaaaaaggacttgtcgtttttatggtccttcttgcttgtcgctgtcatcgcgcttctcgcagtggggatctttaatattttcagcccgctgaattccgccgccatgatggcgtattccgtcatcgggacgattgtgttttcaatgtacatcttatacgatctgaaccagatcaagcaccgggacatcacggctgacctgattcctttgatggcattgacgctttatatcgactttattaacctgtttatcaacctgctacggtttttcggaattttaaacagtgatgattaaccgcgcgaaaaaggcgccctgctgagaggggcgccttttgttaattctaagagttttgaatttttaatctcataagccatgagatcccctttgtcatacgtttgccagctagaagtgaacggagggtttgtcataataacaaacctgtttcaaaaaatttgaaaggggaaggatattatgccttgtagtacagattatgcaacatatgtattgagagtttgtaccgatgcggattcttattctgcaaaagctacttccattgattgtgtagcatcatatgggggcgggacaatcgcaacatttgattattccatgacaattgatgtttggaacggttcaaaatgggtggctaatgaaacaaagaaaggttctttcagtcactcaacacctaaaaaagtatttaaactctcaaatcaaaaatcgttaaaaaaaggatcaaatagtgtgagagtgaggttgaagactaaaaatcgatatacaaatgtaacttccagcattaaaacacctgcatttatagtgaagagaaagtaattttaaaattatttcttctgaaacagcctgaacaaacaaatgtgcaggctgttttgtataaccctcatctttttacttcaatttccatctcatagaaatttgcctttgtttttacgatactactttatgttctgccgccggaaaacagcagaagcttatcaaataatacttcaagcatttttgtcaattccgctttttgttcagcggtgaagctttccatgactcctgaaatgttggagaagtggccgggaagaaacagcatcagcttttcttttccttcttttgtgagttcgatgctgatttttcgtctgtcgccggtatgccggctgcggtttacaaagccgtcccgtgcgagtccgtcgatcaatccggtgatggtcgctttggtgacgttggattttttcgccagttctgtcggactcaggctgtgtccgggtgcgtcaaacagaaacattaaaattttgaatttcccttcggacaatccgtgacttgagaaataatgctccatgacctgattcatttttttagacatatcaaataacgtcaaaaatgttttcaatgattcagcatccatatcggcgtaaatctcagcgcgtccggcaatctgcgagtaatccggcaaatgtctcaactccatttttgtaagcctccgtaccattttagtgattcaaagtataagcttgccggattcaaaaggcaacttataaagattgacagtttttcagcctatatagtaaggtggctaatagttaataagtgataaataaatagagaaggcggtatcgtgatgaaccatgaagtgaaaaagatcatcatagcgggcggagggatcggcggcctgtccgcagcgatttctctcggcagagcgggttttgaagtgaccctttgcgaggcggcgtccgacatgcgaaaaagcggagcgggtattctccagcctcaaaatgcgctgcgggtgcttcgggaaatcggtgtgtatgatgaatgctgtcaacacggctttcaaacggaatggctgaagcagcatgatgaaaacggaacgctgcagtttaaagtgagtgaggcgtttttagatgattcattgccggggcggaataatatattgcggcaaacgttaaacgatatcctcaaaaagcatgctgaagcggcgggggtcacgattctgctcggtaaaaaagtcgtgtcttacgaagaaacggcagatgaaataacggtgcattgtgcagacggaaccgcgatgacggctgacatcctcgccggctttgacggcatccgctccgctgtccgcgatcaaatgctgcaaagagaagtgaaaacagagtatctcggcatgggagcgcacagattttacatttcttttcccgagccgatatttcatgattcgacactgatgtataaaaaagggcagacgcaggtcggagtcgtgccgctctctgaaaaaacaggatacgtatttatcatccggccgtatgacgctgacttcagggatgacgaggacacgcgttttgaacgggtgaaagacttgctgcgcggaattccgggagtgaagtttgtgacagagaatatgtcaaaggaatatcccgttttgtttcataagattgagcagatggcggttaaagaaccgtggcacagaggccgcgtcgttctgggcggggatgccgtccatgcaggagcgccgacattggcgcagggagcggcgatggcgattgaagacgcgattgtgcttagtgaagaactgcaaaaacacgaaaaccatgaaactgcatgtcaagcatacttcgaaagacgggcggagcgggcattacaggtgcagaatctctcatctgaaatcgtccgccgcgagataaagggaacgcccggcgtccaggacatcatgagggaatgctatcgattgctcaaagagccttattaaataaagaaagtccagaacatggcgtctggacttttgtcagtcttgttcagatttattccgtatccgttcaatcacctcatgcagcccctcaggcttgtgaaactccaccggcgaactgcctttttcaaacgagatcgtttccgcctcaatgagcgcgacatagcgcccgttcacttttgcgagatggatggattcaccgaaatcagccagtaatcctttaatctctgtttctccgactttcattttcagctcggcttccggcgtgtgttcaatgatctgcgcggatgcctcgatgacttgatgggtgtcgaggcgctcctgaatttcccgcttttcactcgcttcccaaatttcaatgtcgtgctcaaactgctgaagctcttcgctgttttcttcaaaagtttcatacacgtgctcctgcaccatgttcatgacttggtttttcatgatttccggcatcgattcgccgtattcgacaaatttgagaaaatcttcgaaataacgggcgtgcgaggcctggtggattttcagctcatgctcttccgtcatgccttcttccggcatatacggatattgaatgcttttcatgttttttgtcgtgatggccatttcgacctttttaatgagagacgaggcgtctgagatgcgggcgaccttcggctcgaaatcgcatttcatcataaagacgaatttgtcttcaaaatacttgcgcggaacggccgatgccacgataaaaacaccgccgcgcacagcgctcgtgtcaaggtaagtgcggacgaactgctcgcttgcctcgataaatgcttccttcgtatccgcaagtctggcgcggttgaaaaggttgtaattcggatttgaatcaagctcatggcccggctccgtgataaaatggccgatttttgttgggacttgctcggactgcggatgccgttcggctttccgtttgacgattttcttcaattccccgtcaagaaaatccttcagctcgctttcttcaaattcttccgtgtcaagcgtctggaaatgtttgaactgcttgtttgcctgttcgtcttttccttccacttgaatgacataaaacgataaaaacttgatttcaaaatccatatgtgaactcaccttatttctgtatttaacaagcctctccagtatagaaaaaaccgttatcgatcgtcaatccgaggattgatccgtgacggcggataatcggccggtgaaaagggcaccgtagttggaaggaacgcatcaacgtgttagaaagggtgttattcatgaaggaaacaggtccgattccgcagccgaagacattcggcccgctcggcaatcttcctttgcttgataaagacaagcctacaatgtcgcttatcaaactggcaaacgagcaggggcctatttttcagctgcatacgccggcgggcgccattatcgtcgtgtccggccatgaactggtgaaagaggtttgtgatgaagagcggttcgataaaagcattgaaggggctttggagaaagtccgggcgttttccggtgacgggctgtttacaagctggacgcatgagcctaactggcgaaaggcgcataatattctgatgccgaccttcagccagcgcgcgatgaaagattatcattcgatgatgactgatatcgcggtgcagctgattcaaaaatgggctaggctgaacccggatgaggccgttgatgtgcctgctgatatgacccgcctgacgctcgatacgatcgggctttgcggctttaactatcggtttaacagctattacagggaaacgcctcatccgtttatcaacagcatggtgcgcgcccttgatgaagcgatgcaccaaatgcagcgccttgatgttcaggataagcttatgatcaggacgaagcgccaatttcatcatgacattcaggcgatgttttcgttagtagacagtattattgcagagcgccggtcaggcggccgggatgaaaaggatctgctggccagaatgctgaatgtggaagacccggaaacgggcgaaaaacttgatgatgaaaatatccggtttcaaatcatcacgtttttaattgccggccacgaaacgaccagcggcctgctttcctttgccatctactttctgctgaaacatccccgtgttttggaaaaagcctatgaggaagctgatcgggtattgaccgatcccgttccttcatataaacaagtgctggatcttacttatatccgaatgattttgcaggagtcattgcgtttatggccgaccgcgcctgcgttcagcctttatgcgaaagaggatacggtgatcggcgggaaatatccgatcacgccgaaagacagaatttccgtcttaattccccagcttcaccgtgataaagacgcgtggggagacaatgcggaggaattttatccggagcggtttgaacatcctgatcaagtgcctcaccatgcgtataagccgttcggaaacggtcagagggcgtgtatcggtatgcagttcgccctgcatgaagcaactcttgttctggggatgattctgcagcattttacctttatcgatcacaccgattatgagctcgatattaaacagacactaacgatcaagcccggcgactttcatatccgggtgcggccgagaaacaaagaagccgttgcggctgctctcccggcggctgaaaaagcggcggaagacgtcgaaaaagaaaaacgggaaacaaaaggcgcatccattatcgggcttgataaccgaccgcttctgattctgtacggatcagatacgggaaccgcagaaggcgtggcgcgggagcttgccgatactgccgggatgcacggcgtccggactgaaacggcgcctttaaatgaccggatcggaaaactgccgaaagaaggagctctcttgatcattacgtcctcttataacggaaagcctccgagcaacgcgggacaattcgttcaatggcttgaagaagtcaaacccggggagctggaaggcgtccggtatgccgtcttcggctgcggtgatcataactgggcggcgacatatcaggctgtaccgaggcttattgatgagaagcttgccgaaaaaggggcggaacgcttttcctcccgaggcgagggggacgtcagcggcgattttgaaggaaagcttgatgaatggaaaaaaagcatgtggacggacgccatgaaggcattcggtctcaagctgaatgaaaatgccgaaaaagagcgaagtgcgctgggccttcaatttgtcagcgggcttggcgggtctcctttggcacagacgtatgaagcggtttacgcatccgttgcggaaaacagggaacttcaggcgccggaaagcggccggagcacaaggcatatcgaaatcactctgccgaaagaggctgcctatcatgaaggggatcatctcggcgtgctgccggtaaacagcaaagagcaggtcagccgtgttctccgccggttcaatctgaacgggaatgatcaagtgctgctgacagccagcggacagagcgcggctcatctcccgctcgatcggccggtcaggctgcatgatcttctgagcagctgtgtcgaattgcaggaagcggcatcaagggctcaaatccgggaaatggccgcttatacggtctgcccgccgcacaaacgggaattggaagattttcttgaggagggcgtctatcaggagcaaatcttaacatcgcgcgtctcgatgctcgatctccttgaaaaatatgaagcgtgtgaacttccgtttgagcgatttctggagcttttgcgcccgttgaagccgcggtattattcgatttcaagttcgccccggaaacatcctgggcaggcttcaattaccgtcggcgtcgttcgcggccccgcccggagcggtttgggtgagtatcgcggagtcgcttcgaattatttagcggaccgcggccctgaggatggtatcgtgatgtttgtccgcactccggaaacacgattccggctgccggaagatccggaaaaaccgattattatggtcggtcccggcacaggagtcgccccgttccgcggatttctgcaagcccgcgcggcgttaaaaaaagaaggaaaagagctgggggaggctcatctgtatttcggatgcagaaacgatcatgattttatttaccgtgacgagcttgaagcttatgaaaaagacggaatcgtgacgcttcatacggctttctcccgcaaagaaggcgtaccgaaaacgtatgtgcagcacttaatggcgaaagacgccggcgctttaatttccatcctcggccggggagggcacctctacgtatgcggcgacggcagcaaaatggcgcccgatgtagaggcaacgctgcaaaaagcgtatcagtcggtccacgaaacagacgaacggcaagcgcaagaatggcttttggacctccagacaaaaggcatttacgcaaaagatgtttgggcggggatttgaccgatttgatgaaaaggactggatgactccagtcctttttttacatcagcaaaaaaaaccttcaagtttttcaacccctttgcatacaataacttcagcccgcctgttgggcggctgcctttgatattcatttttcgtttttagaagtttgtgttattcttatatttggtatctcctattttcagacccggtctgatacggtaccttttaatgccagaaaaaaatgtgaaacgaagaacggatatcctgcgtctaatggctggcgggataagatgttcaatgggcatgacacgaatgataaatatatcgtttttttaaatggtgtgtttatggggctgtgtgatgctttcgttttgctcggaaagcaggaattgaagcaaaaagtaagaatacagatttaaagtgtttaggaaagtagaggttgccatgaagaaattattttcttacagacttagtttttttgtactggctattattttgttttgggccaaaacgtatttagcctatcatgctgaattcaaccttggggtgaagggtccgacgcagcagtttctgcttgtgatcaatccgttctcaagcgccattttctttttaggactggcattgtttgcgaaaggccgcaaatcagcgattatcatggtgattattgatttcatcatgacgtttattttgtatgcaaatatcctattctatcgattcttcgatgatttcttgacattcccgaacttaaagcaatccggtaatgtgggaaatatgggagacggcatcttcagcattatgtccggccatgatattttatactttgttgatattattattttaatcgcgcttctggtgtggagacgtgagctgaaggaattcaagctgaaaaaacggtatacgtcattaattatcgtgacgggtattgttttgttcttcgtgaacctggcgattgccgaagaggaccgcccggagctgctgacaagaacgtttgaccgcaattacattgtaaaatacttaggcctttataattacacgatttatgacggcgtacagacggcgcagacggaatcccagcgggcatatgccagcagcgatgacctgacgagcgttgaaaactacacatcgtcgcattatgcgaagccgaacgccgagtatttcggcaaggccaaaggcaaaaacattattaagattcacttggaaagtttccaatcgtttttgatcaactacaaacttgacggaaaagaagtcacgccgttcctgaataaactcgcccgcggcggagaggacatgacgtactttgataactttttccaccaaacgggccaaggtaaaacatctgacgccgagctgatgatggataacagcctgttcggactgcctgaagggtcagccttcgtgacaaaaggggaaaacacgtatcaatcgcttcctgccatccttgaccaaagtgagggctatacaagcgccgttttacacggtgactacaaatcattctggaaccgtgaccagatttacaaacatatcggctacgataaattctttgacgccagcacatacgatatgtctgatgacaaccttgtcaatatgggactgaaggataaaccattcttcaaagaatccattccgaagcttcaatcgctgaaacagccgttctacgcgcatttgctcacgctgacgaaccattatccgtttacgcttgatgaaaaagacgcaacgatcgaaaaagcgaaaacgggcgacgcgactgtggatgactatttccagacggcgcgttatctcgacgaggcgcttgaacagttctttaaagatctgaagtcatccggtttatatgacaactcggtgattatgctttacggagaccactacggaatctctgaaaaccataaccgcgcgatgaaagaaattctcggcaaagaaattacgccttatcaaaacgcgcagaatcagcgtgtgccgcttatgcttcgcatccccggcaaaaaaggcggggtgaaccatacgtacggcggtgaaatggacgttgtgccgacgatccttcacttggaaggcatcgattctaagaaatatattaatttcggcaccgatctcttctcgaaagaccatgatgatacggtgacgttccgtaacggagattacgtcacgccgaaatatacttccatttccaatgtcgtatacgatacgaagacaggaaaagaactgaaaggcaatcaggaaacgaaaaacctgaaagccagagtcacagagcagctgaagctgtctgacagcgtgatgtacaaagacttgctcagattccacaaattgagcgactttacgccggttgatccgtctaaatatcattacggcaaagaaaagctgaatcaggataataaataatagaaagagccttacggaatttccgtgaggctctttttttgtgtgtatcttcaccaatctgaaaaaagagagagcttttggtcacaaagggcgccaatctctcatatcttacagtagattttgaaaccggtgatagagaatcggacaaattatcgggttggtttctcttatacgggcggtttcgaatccaatattcacagagaagaggggtagagatgaaagcagtcattctctgcggcggaaaaggaacgagaatgagcgaaatcaccaatgaacgtcccaaaccgctcgccatgataggcggcaaaccgattctatggcatattatgaaactctatcaatactatggcgtgaacgaatttatcctgcttcttggtttcaaaggagagatgattaaggaatatttcttagattatgactggaagaatcacagcatgacgctggacagctctaccggagaagtgcggatattgggaaaatccgagccgtggaaaatcacttttttagacacgggggaacacacgcagacagcggggcggcttttacaggcgaaggacatcatcggtgatgaaacctttcttatgacgtacggggacggactggccaacatcaacctgtttcatctgatcagctatcatcaatcaaaaggggctgcggtgaccgtcaccggtatagaaaagacctcgcaattcggaacgctgacggttgaagacggtatggcgaaaagcttttctgaaaaaacctcaagtgacggcatcatcaacggcggatttttcgtgctcagcccgaaggtatttgattatctgccgaaagacagggatgtcatgtttgaagaagaaccgctgaaggagctggcgaaagacggcgaattggcggtataccggcattacggtttctggacggcgatcgatacgtataaaaacctgctggaaatcaacaagatgtgggaccggggacaacatgtatggaaggtatggtgatcaagtttgagtttctggaaaaataaaaatgtgtttgtgacgggatgcacaggtcttttaggaagctgcttggtgaaggaactgatcgatcagggggccaatgtgacgggacttgtccgtgacactgtgcccaagtcgaacctgtatcagggagaacaagtgaagcaaatgaatatcgtgcagggcgcgcttgaagatctggatgtgattgagcgggcgctgggcgaatatgaaattgacacggtctttcatttagccgctcaggcgatcgtcggcgtcgcaaaccgcaatccgatttccacatttgaagccaatattcttggcacatggaacatccttgaagcgtgccgcaggcatccgctcatcaagcgggtgatcgtcgcgtccagtgataaagcgtacggcgaccagccgacactgccgtacgatgaaaacatgcctcttcagggcaaacatccgtatgacgtatcaaaaagctgtgccgatttgttaagccacacatattttaatacgtacggacttccggtctgtattacgcgctgcggcaacttgtacggcggcggagatttgaacttcaaccggattattccgcagacgattcagctcgtgctgaacggtgaagcgccggaaatccgcagcgacggcacatttatccgtgattatttttacatcgaggatgcggtcgaggcataccttttgctggcggaaaagatggaggagctcaatcttgcgggagaagcgttcaacttcagcaatgagattcagctgacggtgctggagcttgtagaaaaaattcttaaggccatggacagtgacctcaagccgaaagtgctcaaccagggaagccatgaaatcaagcaccaatatttatcggcggaaaaggcgaggaagcttctgaattggacacccgcacataccattgatgaaggattggaaaaaacgatcaaatggtataaagccttttttcaaaagtaacagaaacagaggtgagagaaagacgtgacaagcgcatattgcacagttttatcaaaaggaaggctgtatcaggctatcgctttgttcggctcattgaaagcggttcaggcggacgcccccatttttactttgtgtatggaccaagacacctatgacgtgcttcaggcaatgcggcaggataatgtcaccttgattcaggtgtccgcactggaaaatgaggagctccttgaactgaagcggacgagggatcagagcgaatactgctggacggtgaagccggtatttctcgaattcgtgctggacggacatccggaattagagcgtgtcacgtacattgatgccgatttgtttttcttcgctgatccgcgcgcgatttttgacaatcagccggattgttcggtgcttctgtcacggggcgatatcgtcattccctcatttggaaaacaggaaatcgacatgctgcagcgtcttttaggccggtataattccggttttctcagcttcaaaaccgacagtgccggcacagattgtctcagatggtggaaagaacgctgcctggaagaatgcaaaaatgcgccgggcgaaggaaaattcggagatcaaggctacttggattacatgtccggcctgttcccgaatgtgtgtgacatcaccacgcccggcgtgaatatcggccattggaattacggccgccacacgttttcatggaaggacgggcgtcttgtgctcgaagacggaagtccgctgattttctatcatttcagcggataccggatcgttacagccggcgacattcggcagattcatgagacggaccggaccgacctgccgtttgtccatcagctttatcaggacattctgaagcgggtgatcgggacggtcagcgccgtctgcccggagttcagcggctttgcatctgaggatgataacaaataaatgatcatatacaggaagtgaacgaaaagtgaaggcaagcgtcattgttcccgcatataattccaaggagcggctttataacagcctgctgtccctgaatgaacaggaatgcacagagccgttcgaagtgattgtggctgacaacggttcggaagacggaaccttatccatgcttgaatcattcagcgcgaattttccgctgatttttgtgagaattaaagaaaacagagggatcgcttacggacggaatcaggcggtccgcaatgccagaggcgatattttgatcttccatgacagcgacatgcttgccgaaaaggatttggtggcgaagcatatcaaggctcatgagaaccgggacgatttagtcgtatgcggtatgttctggaagcggatttacagcttttattatgaccgttttgaaaaagagcataaagagaaactcgccgaactgtatgaagagctgccgggcgataaagagccgctccttgatgaaagtgacatcagagacggaagttttcttgaccaatgctttgatttagataccgactttatccgggtgctgaaaagcattttggaaaaatacggagatgatttgaacggctaccgtctgccgtggcgttttttcattacgaacaattcgtcagtcaagagacagcacgtggcagatctcggcctgtttgatgaaggcattgtcagatacggctttgaagattatgatctcggcatcaggcttcatcagtcgggaatgagatttcagctgcggcgcgatatcatgagcgtccatcaggagcatccgagcaactgcgcttccgttgatgatatcagggcgaatatcgcgtacatgtgcgacaagtacaatgacattcattcgcttgacgtgcacctcgcgtttaacggcccgtttgacgcggagttaaccaacagcatgatggcagacatcgaagtgctgcttgattatgagaaatatgaaagcctgctgcacatttttctcgagctgctgcacgcggttaaagaccgcaacctcgacccggactggaagacgaaaagcccgcggatcacggcgaacagcttcaatctgccggaggtcggaaagcttttggcaaaagcggaaaaaaagctgggcgtcacgcactttgcaagggcgttcaaagcgctggctgctgatttactgcatgtggatcttaaataaattggatgtgatatggtgagtaaatatcatttttcaaccattgtttccagaacgcatatctttaaactgatgccgatgattcattctctccatgagcattgccgggattttcatctgtatgtgctgtgtgtcgatcagaaagcgtacgaactgcttcagcaggtgccgtgggaacatgtcacggcggttcagctccatgaaatggaggacccggagctgcttgaagcaaagggcggacggacgtttcatgaatattgctggacgctgaaaccggcatttctgttccatgtgatgacggagtatgatggagccgaatattttgcccacttggacaccgatctctttttcttctcagatgcgggcgagctgtttgcggaaaagccggatgcttccctttttctgacggatcaccgcaattcagaacggtttgcgtcttattacaagctgacagggcagtacaacaccgggtttgtcggcgcgcggaataccggggaagcgtatcgggcggtctggcaatggaggcaggattgcatctcctattgtacggtggagatgaatgaagaaaaaaagacatacggtgaccaaaggtatgttgaaaagtggcccgcgcagtttgaagacgttcatgtcacggagtcgatcggcgcgaatgcggcgctgtggaatattgagcaatatgacgtcagcctgcgcggcggggctgtatatgtcaatgacaccccgctgattttttatcatttttcaggctttacgctcgtcacggagaacgaattcaatctgtgctggtactatcacattgatgacgaggcgacagtcaatatgatttacgtgccgtacatcaaaaacgtaaaaaaatggattgatgaaattcaaaaagcgtttcctgatttcagagacgggtttattccgaagtatgcggttcctgacactcatttttatacggttgaaacataaaatccctgccttttcggcagggattgtttttatgaatgccattcttttaatgttttgtcgctcggcaggacaaaggcgagcagacctaaaacgggcagaaaggcgacggctgtcatggtcggcgtcaatcccgctgaatcaataagagctccgagcgcaacggctccgatcgcgcccattccgaaggcgagcccgaccgtaagccctgacatcgttccgattttgcctggaacaagctcctgcgcgtagacaacagtcacggagaagctggacatcagaacaacaccgatcagcgccagtacgccataggcgatgacaggtcccgcaaacggaaggaaaatcgtcaatggagccgatgctatcatcgaaacgatgatgacgttccgctttccgaaacggtctgcaagcggcccgccgagaaacgttccgacagctccgaaaaataaaaagacgaagatgtagctctgtgcctgctgaatgctgacatgataggcattcatcgcatagaacgtataaaagttgccgatcgcgctcacataccaggagcgcgcgaaaattaagaagataatcatgataagggcgagaataatcggttttgtaatcacggtctgcacagcggaggccggtgattttttacttacggcccgcaaatgaataaggcggcctttataccatttggcgatataaatgagaaacagaacagcgattgcggcgactagcgtaaaccagacagagccgaattgaccgagcggaacgagaatcagcgcggtaatcaagggcgccatcgcctggccggtattccctccgacttggtaaatcgattgcgccaagccgcgcttttcgccggcggccatgtaggcgacacgcgatccttcaggatgaaagacggcggagccaaggccgataaaaaagacacagcataaaatcgtcagaaaagacggggcgaacgcgagacctaaaatgccgagcatgcttgcggtgagtccgagcggcaaggcatacggcatcgggcgtttatccgtataccagccgatgacgggctgcatcacggaagacaccatattcagcgtaaaggcgataattccgagctgcgtaaatgtaagattcatggaacgttccaaaatcggaaacatcgccggaatcaccgcttgcagtgaatcgttcagcagatgacagatcccgataatgaacaaaatagaatacatggttgtctcgggacgatggacaggtttttctttaagcggggcggcaattgccaaagtgattctcctcctttttatgtaaacgaagcatacaccatattattcataaggtgaatgaattatcaagtgcaaaaaaggctcttctttctcaaacagaaaaaagagcctccctttttatttatttaacaaactgtgttttctcgaatacatcatataaacgacgatcccggcggcgatccagatgacaaaggcgagccatgtcacgcccggcaggctgcttgcgagatacaggcataagcatgcgctgatgatcggcacaaaaggcacgaaaggaacacggaaggaagatttgatctccggatgtttctttcttaaaacgatgacggcgatcgcaatgaccgtaaaggccgccaaggttcccatgttgacgagatgagccagggttcccagatcaataaaacccgcgatcccggcggcaacgatccccgtcacccatgtgttttgaaacggtgttttaaaacgcgggtgaaccttggaaaacatgcggggcaaaaggccgtctctgctcatcgcaaatgtcaggcgcacctgagcgtaaagcagagcgagcatgaccgttgtaatcccgataatcgcgccgacggaaataatgcctgctatcttgttctggccgacaaattggagcgcgaaagataccggatccccgacattcagcttggtgtacgaaagcattcccgtcaggacgagcgataccgtaatgtaaaggacggtgcagatggcaagcgcgccgatgattccgaacggcattgatttctgcgggtttttcacttcttccgacgcgtttgacacggcatcaaatccgagatacgcgaagaaaacggtcgcggcgctcgtgatgacgcctttcattccgaacggcataaacggcgaccagttttccggtttcacgtagccgaaaccgacgatgataaacagcagaatgatcgcaattttcatcaatacaatgacattgttaaagcgggtgctttctttcacgcctcttgaaacaatcgcggtaatgaccaaaataatgataacggccggcaggttgaacacggcacccgttttgctgccgggtgcggcggtcagcgcctccggaagatgcagcccgaagcccgcaagaagcgactggaaataggatgaccagccggttgcgacggcggcgagcgcgatgacatattcaagcattaagtcccatccgattaaaaacgcgagacactccccgagagtgacatatgaatacgtatatacgctgcctgaaatcggaatggatgaagaaaattccgcataacaaaacgcggcgagcgcgcaggcaaggcccgcgagcacaaacgacagaatcaaagccggtcctgcgcctgtcgcggccacagtcccggtaatcacaaaaatccccgtgccgacaacacagccgattccgagcaaaaccaagtcaaaagcgcttaacgagcgggacaggctggtctgtttgctctgggcctttaagtcggccagcggctttttccgaaatagtaaagacatatgggtcctcctgaaaattcataatattcttatcattatatacactgacgtttgtattatattgtcgaaatttctcgcagtcaattaaagaattttccactttaaaaggacaaagctaaaaagcgtcgatgcacggaaggaacgggaattttattgtgaaatagttcaattttctcaccttaagaccgatacaaaagatgactcatcaactaatttcaagtttcggtgaaagggagatgttttacatgtttcaatatgaagaactaaataagcagtttatcggcggccgatggagggatgggagcagccggaacgtattggaaaacagaaatccttatactcaaaaagtcatcacctcattccaaaaagcgacgtctgatgacgtggatgcggcatatcgcgccgcggctcttgcgaaacaagaatgggacaaagtaaacccttttaaaaagcgggccattttggaaaaagccgtttctttcattgaagagcacgaagaagcgattatttacttaatcatggaggagcttggcggaacacggctgaaggctgagtttgaaatcggacttgtcaaaaatatgataaaagaagccgcaacatttccggtgcggatggaagggaaaattctcccgtccacgattgacggaaaagaaaacaggctgtacagaatacccgccggagtcgtgggggtgatcagcccgtttaatttcccgtttttcctttcgatgaaatctgttgcgccggcactcggcgcggggaacggcgtcgtgctgaagcctcatgaagaaacgccgatctgcggcggaacgcttatcgcgaaaatttttgaagcggccggcgtaccggacgggctgctgaatgttatcgtgacggatatcggggagatcggcgacagctttgttgagcatcccgtcccgcggataatctcatttacaggctcaaccggagtgggcagctatatcggacagcttgcggtcaaacactttaaaaaaccgctgttggagcttggcggaaacagcgcgctgatcgtgcttgaggatgctgatcttgaatacgccgtcaatgcggccgtattcagccggtttacgcatcaaggccagatatgtatgtcggcgaaccgcgtgctcgttcacacatctgtatatgacaaatttacagagctttacgaagcgaaagtgtcatcgctgaaagtcggcgatccgatggaccctgatacggttatcggccctttaatcaatgagagacaggcggaaggtttgagacggtctgtcgaaaaagcgatagaagagggagcggttccggtgctgtccggccgattcagcggaacggtcgctgagcccgtcattttaaaagatgtgaaacctgagatgagcattgcgaaggaggagctgttcggaccggccgtctgcatcatgccatttgaaacggaggatgaagcggtaagcatcgcaaacgcgacaccgttcggtttaagcggagccgtgcatacggcaaacgttgagcgcggcgttgagtttgctaagcggatcgaaaccggcatgattcacgtcaacgatacgaccattaatgatgaaccgaacgtcgcgttcggcggcgagaagcaatcaggtctcggcaggctgaacggtgaatggagccttgaagaattcaccacgctgaaatggatttcggttcagcatgaaaaacggcaattcccatattaagaaggagtgaaagaaatgagtatacagacggagcagcaaacgcacagcctgcttgacgcatttgtcaaagttgcgccttttttaaacagcctgatccaagatgacatcaccatcggaatttatgatacagaaaaattaatcgtgaatattccggctaaaacgttttctcttaatgtaaagccgggagacccgctgcaaaaaggggacatcattacagacgcgatccgcatgaatcagaagaagacaagcatggtgccgaaagagctgttcggatttccgctgatcgccagagcgattccgcttcacgatgaaaacggaaaagtcatcggcggcgtcggtctcggcacgagccttgaaaaatcagccaagcttcatgatgtcgctgaaagcctgtccgccgtcgtggaacagaccgcttcggccatcgcggatatctcagaatccatcagcggtttctcagcacagatgaccggaatttccgctcaggcgaaacaagtcagtgaaagcgcgggagaaatcgccgacatttccgtcactgtcaagggcatctcggatcaaagcaatctgctcggtttgaatgcggccattgaagccgcgagagcaggagaatccggcaagggcttttccgtggtggcggatgagatccgcaagcttgccactcattcaaaagacaacgtcggccaaattgaccagattacgaaaaaaatccacagcctgctgaaagggctggaggactctattgaatccatcaaccagaacacaaacggccaagcggcggcggttgaacaaatttctgccacgatgcaggaaatttcgggaagcgcccagcatttagcgaaaatggctgaaaacgtactcggagagtcataaaaaaagggagcttacgggctccttttttgttttcctttatcaatcggaaactgcacttacacgtttgatccgtcatgctaaaggggtacacatacgaatacatcaccaatgataaaggagagtcttgtatgtctgatgcaaatctgcacaacccgctgacgaaatatgatcatgatgaatttccaaaacaatatcaagaaccgcccggtttgcagaaagagatgaagcctgtgccggattgcggtgaaacaagctataaaggagccggcaagctgaagggaagaaaagccctcgtcaccggcggcgattcaggtatcggccgggccgccgcgattgcttatgcccgggaaggggcggatgtggcgattaactatctgcctgaggaacagccggatgctgaagaagtgaaagcgttaattgaaaaagagggaagaaaagccgttctgctgccgggagatttaagcgatgaagcgtttagcggagaattggcggaaaaagcgtatcaagagcttggcggtcttgacacgctcgctcttgtcgccggcaaacagcaggcagtggatgatatcagcgatcttactacagaacaaatctatcaaacatttgaagtcaacgtattctcgctgtattggctcgtcaaagccgcgcttccgtatctgccggaaggcgcgtctattatcacgacaacgtccgtagaagggtataatccaagcccgatgctgttggattatgccgcgacgaaacatgccattatcggttttaccgtcggcttaggaaaacagctggcgaataaaggaatcagagtcaactcggtagcgccggggccgatctggacgcctctgcagatttcgggaggacagcccggtgaaaacattccgaaattcggtaaggaaacaccggccgttccattaaagcgcgccggacagccggcggagctagcagggatttatgtctttttggcctcagaagaatcgagttatgtgacatcccaaatttacagtgtaagcggaggaattccgacagcgtaatcaataaggagctgcccttcatacggggcagctctttttttcgatgttatgtgccgagcacgttttgattatacaggacactcggatgtgacggatgataggaggcggctttgtcgttatgaatcttcgctttttctctgtcgccgagctgccagtggcagacgcagagctgcagatggggataccaggtggaatattcgagctgggtaaagcctgcatcactgcttttggcggatagggcgagttcataccaaaacacgccctgccggtattgccgtttctccgcaaaatagtcgccgagcctgcagcagaactccggacgcggacaatcgatcagaaatgattttaagagagacgtcatggcggcctcttcatggccgaccgccctgtagcaatcggatagatattggcacgttctgatctcgtcttcgatccagcactgttttgtggaaagaaaatggtgataatacgtgatggcgcgctgatactggccgtgatcctttaattcattcgcgaagtaaaacaaatcgcgcggtgtcatcgtttcactgttttccgccattttctcataaatcttcaagttgcggtctgagggaggcgagtgctttttctcggatttccggtgtgtgacggcaatatcggtttctatgatgtttccgtatacttcaagatactcatgcacggctccgatccagcggaaccctttttcacgcttgacgagtcggttgcggcggtatctgaagctgacctctccccgagcatcaaagccgacgtgataatacatggataccgcgtccacctcttttgaaagcgacgccttcagttcaatcagcttttcacggtccttttccgtcaatatatcgtcggcgtccagccacagaatataatccatttctgctttcgaaaacacaaagttacgggcggccgcaaagtgatcgatccattcaaaatcataaatcttatccgtataacgggccgcgatttctttcgtccggtcagtcgagcccgtatcagcaatcacaatttcatccgcaatgtctttgacggaatcaagacagcccgcaagcacttcctcttcatttttcacgataacgcacaaactgacgctgatcatgtcatcacctcttcccctccagtgtataaaaggagaggcggaaacattcttcggacaaaatgatctcttccaagaaatttgtctgtccttttactagttttattccagcgcctgatttaaaatgaacacatgaacttacgtgaggattgatagggaccatgagcatcataaaagcggaaaacctttataaaacatacggagataagacattattcgaccatatctcctttcatattgaagagaatgaaagaatcggtttaatcggcccgaacggaacggggaagtctacgcttctgaaaaccattgccggccttgaatcaacggaggaaggcgagattacggcttcaggaagcgtgcatattgagtttttgcatcaggaccctgagcttccggccggacaaaccgtacttgagcatatttattccggcggatcagccgtcatgagaacgatgagagaatacgaaaaagcgcttcaggcgctgaatgaagaaccggaaaatgaccagcgccagaaacagctgcttgatgcgcaggcccgaatggacgcgaatgatgcgtgggaggcgaatacgttagccaaaacggttttaaccaaacttggcgtcaccgatctgatgaaggatgtcagcgagctgtccggcggccagagaaagcgcgtcgcgattgcgaaaaacgtcatccagccggctgacctgctcattttggatgaaccgacaaaccacttggacaatgaaacgattgaatggctggaaggctacttatcgcaatatccgggcgccgttatgcttgtcacgcacgacagatattttctgaacagggtgacgaacagaatttacgagcttgagagaggcagcctttatacgtataaaggaaactatgaagtattcctggaaaaacgggccgaacgggaagcgctggcggagcagaaagaaacaaaacgtcaaaacctcctgcgccgcgaattggcgtggctcagaagaggggcgaaagcgcgctcgacgaaacaaaaagcgagagtggacagagcggaggcgctcaaagagcaaaaagggccggcagtctccggatcactcgatttcgcgatcggttcccaccgtctcggaaaacaggtgatcgaagccgataacgtcgccattacctataacggccaagcgctgatcagccggtttaatgagcttgtcatcccgggggaacgaatcggcatcatcgggccgaacggaatcgggaaaacgacacttttaaacagcctcgccggcagaattcagcctgacagcggcagtatcaccatcgggcagacggtccggatcggctactacacccaggaccacagcgaaatgaacggtgatatgaaagtcattgaatatataaaagagacggctgaaatcgtcaaaacggcggaaggcgatgtcatcaccgcggaacaaatgcttgagcgttttctgttcccgcgtccgatgcagcagacatatatcagaaagctgtcgggcggggaaaagcgccgtctgtacttgctgaatgtactgatgcaggaaccgaatgtgctgtttttagatgagccgaccaatgatctggacacggaaacattaagcgtgctcgaagattatatcgaacagttcccgggcgtcgtcatcaccgtatcccatgaccgctatttccttgaccgcgtcgtggaccgcctgatcgtatttgaaggacacggtgtcatttcccgtttccaaggttcatacagtgaatacatggaacaagcaaaagcgaagaagacggcggtaaaacagccggccgaagagaaaaaggcggaagaagagccgaagaaaaagcgcaaaaagctttcatataaggatcagatcgaatgggacggcatcgaagacaaaatcgccggccttgaagaaaagcatcagcgtctggaagcggaaatcgctgaagcgggaagtgatttcggaaagattcaagaactgatggccgaacaggcaaaaacggctgaagagcttgaagcggcgatggagcgctggaccgaattgtcactgatgattgaagaacttgagaattaagaaaagccggtacggcccccgagaaagatggcgggtcataccggctttttttatcttacacagatgtctcccggcgctttaaagacaaacgttttgtccaagcaaagtttatcaggcgtaaaaagttaacgtttacgttaaggttcaaatggtgtataatagaaacagatacgacaagagggggattcaccttggaatggatgaagattgatcaagttgccaagcgaagcggattgacaaaacgaaccattcgtttttacgaggagattggtttgattcctgctcctaaacggacagaaggcggcgtccggctttactctgaagatgatatggaggagctcgaaaaagtcaccagcacaaaagaagtgctcggtttttcccttcaggagcttcagcactttatggagatgagccgtcagctggaattaaacaaagaggggtacttgttgtcactggatccgaaggaacggaaagaaaagctggaagagattcagcacgctttgaaccaccagcttgagatgattgatgagaagatcagcacatttcagcattttaaaacgcgccttaacggaatgaaagaaaaagctgaccgcgccattcaatcaatcgaatgattttgctgtaaacgctatggatatagcgtttcttttaatggatgaaacaggaggtctggtcaaatggatacatcatcacaacagaaaacaggcttattcagccagccgaaagccgtttgggcggttgcgtttgcctgtgttatttcctttatgggaatcggtcttgtcgatccgattcttccggcgatcgccgcacaattacatgcttcacctagtgaagtatctctgttatttacaagttatttgctcgttaccggttttatgatgtttttctccggcgcgatttcaagccggatcggcgcaaaatggacgctgcttctcggacttatttttatcatcgtgtttgccgccctcggcggaagctcaagttcaatcgctcagcttgtcggctatcgcggcggctgggggcttgggaatgctctctttatttcaaccgcgcttgcggtcattgtcggggtatctgtcggcggcagcgccaaagccattattctgtatgaggccgcgctcggcttggggatttccgtcgggccgcttgcaggcggagagcttggcagcatctcatggcgcgctccgttcttcggagtatctgtcctcatgttcatagcgctttgcgcgatttcactcatgctgccgaagctgccgaaaccggcgaaacgcgtcggtgtgtttgatgcgatgaaggcactcaaatataaaggccttttgacaatggcagtatctgcattcttatacaactttggattttttattttgcttgcttattctccgttcgtgctggatttagatgaacacggccttggatacgtcttcttcggctgggggttattgctggcaattacgtcagtctttacggcgccgctcgtgcacaaagcgctgggaacagtgggttcgctcgtcgttctctttatcgcctttgcggtcattctcatcgtcatggggatctggactgaccatcagacgttgatcattacgtgtatcgttgtcgccggtgctgttctcggtatggtgaatacgatcatgacaaccgctgtgatgggttctgcgccggttgaacgttcaatcgcgtcttcagcctacagctcagtccgttttatcggcggtgcgctcgctccgtggattgcgggaatgctgtcagaacacttcaccgcaagcactccatatacagtaggcgggatcgtcgtttttgtcggcatgcttgtccttctcatgggacgcaaacatctcgccggaataaaagccggacattaagaaaaaaaggaacttccgcatgggcgggagttcctttttgtgtttacagcactttcgtcgtccaagattcacaattccatgtttccgtcgcgatatccatgtagaactcgggttcgtgggaaatcagcagaatggagcctttgtattctttcagcgcgcgtttcagctcttctttcgcatcgacatccaggtggtttgtcggttcgtcaagcacgagcaggtttgtttctgaattgatcagcttgcacagtctgaccttcgctttttctcctccgctgagaacggagacgcggctttcaatgtgtttggtcgtcaggccgcatttggcgagggcggcgcggatttcgtactgggtaaaggaaggaaattcgctccacacttcttcgatgcacgtattgttattagtttctttcacttcctgctcgaaatagcccgtgtattgatgctcgccccgttccaccgtgccttccagcggcttgatttcaccgagcaggctctttaacagcgtcgtcttcccgatgccgtttgcgccgtacagggcgactttctgtccgcgctccattctgagattgagcgggcgtgaaagcggagtatcgtagccgatgactaagtccttcgtttcaaaaatgagcttgcctgacgttctcgcaggcttgaaatggaattccggtttcggtttttcggccgccagttcgatcatatccatcttatcaagctttttctggcgggacatcgccatatttctcgtgctgacccgcgctttgttgcgggcgacgaaatctttcagctcagccacttcctgctgctgttttttataggcggcttcgagctgctgttttttcacttcgtagacttccataaactgatggtagtcgccgacataacgagtcagctcctgattttccacatgataaatcaaattgatcacgctgtttaaaaacggaatgtcgtgagaaattaagatgaacgcattttcatattcctgcaaatagcgtttcagccattcaatatgctgttcatcaaggtagttggtcggttcgtccaacagaaggatttccggtttttccaaaagcagcttggcgagcagcactttcgtccgctgtccgccgcttaaatcagtgacgtcgcggtcaagtccgacatcctgcaggccgaggccgcgggcgatttcttcaactttgctgtcaatcacgtagaagtcattgtttgtcagggcgtcttgaatgacaccgacatcttcaagcagctgctgaagctcatcagggtccgcttcgcccattttgttgtaaatctcattcatttcctcttccatcgcaaataagtaatggaacgcatctttcagcacgtcgcggatcgtttttcctttttcaagcacggtatgctgatcgaggtagccgacgcgcacgtttttcgcccattcaactttaccctcatcaggctcaagctttccggtaataatattcataaacgttgatttaccttcgccgtttgctccgattaagccgacgtgctccccttttaaaagacggaacgatacattgttaaaaagcgcacggtcaccgaagccgtggcttaactcttttacggataaaatactcatcattacacctctatcgttatcagacacgcattttttatcatgtgtctttctcatttatgattataaaggaggagaccgtttgttaaaaggcttggaaggaaaaagaaaattgcgtttggcgcgtgcatttgagatactatggagtagattttaagaattgaggagaacgacatgacccaaacatggccatttttacagcatacacaaccatttatcgccgaaaactgggaggcgtcaggttttcaggagccgaccgtcattcaggaaaaagccgctcaggtgattatggaagggaaagacgtcatcgccgaatccccgacgggaacgggaaaaacattggcgtacacgcttccggttctggagcggatcaacccggaacagaaacatccgcaagtgatcattttagcgccgtcccgcgaacttgtgatgcagatttttcaagtgattcaggagtggataaaaggctctgatcttcgcgctttgtctttgatcggcggagcaaacgtgaaaaagcaggtggaaaagctcaaaaataaaccgcatatcattgcgggcacaccgggcagggtgctcgaattgattcaggcgaaaaagctgaaaatgcatgaagtcaagacgatcgttcttgatgaagcggatcagctcgtgacacaggaacaccgcgaaacgatgaaaaaaatcattaaaacgacgctgaaagaccgacagcttttaagcttttccgctacgctgcagccggaaacagaacaggtgctgaataccatcgcacacgaaccggccgttttgaaagtggagcggaatacggcggaaaaagcgcgcgtcacgcatcaatatctcgtctgcgatcagcgggataaagtgaagctattacaaaagctgtcacggctgaacggcatgcaggcgctcgtgttcgtcagagatatcggaaatttaagcgtctatgcggaaaaactcgcctatcaccacgtggatctcggcattctgcacggagaagcgaaaaaaatggagcgggcaaagatattatcagcgtttgaacggggagaatttccgctgcttctggcgactgacattgcggcgcgcggactcgatatcgatgatcttccgtacgtcattcacgcggacatcccgaatgaagacgggtacattcacagatcaggccggacggggcgggccggtaaagaaggaaccgtactcagccttgtcacgccgatggaagaatccaaattgaaaaaaatggccaaatcactcggaattgcgctgaaagaggccgtttattcaggcggaaaattatctgagaaataagaaacggagggcgggaagcccttcgttttttgttgtaaaataatagaaaaggttcaggcgggggcgggaagatggtttcaatagacagatttcaaatattgaaggaacgtgagctgaaaatacttgaacactggtttaagaacgataatatcagacggagaatggatgcgatgctgccattagacgcgtggtatgcacgattgaataaagatgaagacgatactgtcattatggcatatgacggggagtgtccggcaggcatggtctctatggagtttgtggaggagcgggcgtatatcggattgatcgtcaatcctttgtaccagcttcaagggtacggaaaacagatgttgcaaaaactgctgactgaccctgggtttaccagcgtgcgggaatgggcggcaaacatcgaaaaagacaatcaaatcagtttagcctgctttcaagcagcgggattcactttggaagatacggagcctgatgaagacggctttcttactttgattcttcgcggctgatcccaaataaacagaaaaggaggggacaaagccctccttttttttatcatcatgttaacttagatcactgactttgatgatctgtttgcctttgttttctcctttaaacaggccgaggaacgcgtcaggaatatggctgaatccttccgtaatcgtttcttcataatgaagctttccgtccttaagccattcggccaattgtttcgcaccttcggaaaagcggtcagcataatcactgacgatgaatccctgcatcagcgcttttgttttgatcagcttcggctggacgcgggggcccatgtcttcttcttcactttcggtattgtacgatgagatcgctccgcataccggaatgcgggcgaattcattcagcaggtttatcaccgcatctgaaatcggtccgccgacattgtcaaaatagacatcgacgccgtcaggacatgcctgttccagcgctttttgaatatcatccgccgttttgtaattaatggcttcatcaaattgaagctcctctttcaaatacgcgattttttcatcagatccggcgatgccgacaacccgcgcgcctttgattttggcaatctgtccgactgttgagccgacggcgcccgccgcgcctgaaacgacgacggtttcgccttttttcggacggccgatatcgagcagcccgaagtaagcggtcagtccggtcatccctaaaatgccgagatacgcctgggcgggtgcgatatccgtatccaacttgcggagggcggactcattgacggctgaatattcctgccatgcgagatttccgatcacaacatctccttttttcagcttatcgccgtctgtcagaacctcggcaatcactccgcctgttatggcttcatctaaagcgaacggctctacatatgattttgtatcttgcatccgtccgcgcatgtacggatcaacggacacataactcgttttcacaagcacttcgccgtctttcggttcgggaacggcaatcgtttcaaagcggaaatcgtcatgggcgggaacgcctttggggcgtcttgccaattgaatttgctgctgatgattcggcatactgaatcctccttcaagataagtggttgttccaaatgtaacacgaaccatttcccgattacaaaatcaaaccgtcagcggccataaaaaaagaagggccagggcccttctttccttatatgcatatttaatagaataaccggtacacatcggtgtttttctcatgttccaaatattcataggcattcgtttttgaagaatgaagcatgtcagcggtaatcacgggctgaagcgcggtcagataagaactcagcctattttcaatttctgtcggcagaacggattcgatatcaccgatattgataatgatagagaaaacgaaatcgatattaatatgaaaagtatcttcagcaaaggccgtaagctcttttattccatccgggcagcgggtatgccggcggaatacctgcttcactaaatcactgacaacccaagcgttaaatcgctgttccggtgaaaagtaatgaataggaaccacctccctgcttaatcggctcatgaagatttttatttttctgataaaagttgctttttctactgtaacatgtcccgccagaaaatatccaccgacaatctgcccgttttcccactgaactctctttcttttgtttgatccttgattgatcgggtaaacatccaatatacaaaacaaaagggaggacttatcaatgaaaccggtagtaagagaatatacaaatgatcaaaaactgatgcaggacgtaaaagagcttcagcaattgggtgtcgcaaaagaagacgtatatgtgctttctcatgatgacgacagaacggaccgcctggccgataatactgatgtcaataccatcggagcgaaagaaacgggcattaaacacgcagtcggcaatatgtttaataaaaaaggcgacgagctccgcaacaaaattcacgaaatcggcttttcggaagaggaagcatcgcaatttgaaaagcgcttagatgaaggaaaagttcttctgtttgtcacggataacgaaaaagtaaaatcatgggcgtaagctgaacagatcccaaggggttttcggtcccttgggatttttttgcggtttccgcaataaaaccgaaaggcacattctgtacattttcggtgctgtttctcaactgatttgatacaattcaattgtaataaattggaacaaagaatcaggaggagcacaattcatgaaaaaaatgttatttatgctggcggtttgtttatgtatgatccctgcggacgtctatgccgctgatctgggacggcagacgttaggaacaaatgacggctggggagccgcttccggcgggacaaccggcggcgcgaaagcctcttcatcgaatgtatacaccgtatcaaacagacagcagctcgtttctgcattagggggaagcgccaacagcacaccgaagattatttacatacaaggcacaatcaatatgaatacggacgaccgcaataaaacgctcggctttgatgattataaagatccggcatatgatccgaacgcctatctgaaggcgtacgacccggacaaatggggaaaaaaagcgccgtcaggcacccaggaagacgccagacagcgatcgcaaaaaaaccagaaggcacgggtcgtggttgacattccttcaaatacgacgatcatcggctcgggttcaaatgccaaagtgacaggcgggaattttaatattaagaacggcgtcgacaatgtcatcatccgcaacattgaatttcaagacgcttacgactattttccgcaatgggacccgacggacggcagcagcggcaactggaactcggaatatgacaatatcaccattaacggcgcgacgcacatctggatcgatcattgcacctttaatgacggatcgaatcccgacagcagttttccctactattacgggagaaaatatcagcaccatgacggccagacggatatagccaacggggcgaattatattacattgtcctataataaatatcatgaccatgacaaaggctccgtcatcggaaacagcgacagcaagacgtcggatgaaggaaaactgaaggtgaccattcaccataactattaccagaacatcgtccagcgcgcaccgcgggtccggtacgggcaggttcatatttataataatttttacgcaggctctaaaagcgccgcatacccgttcagctatgcgtggggcgcgggccacgcgtcaaaaatatatgcccagaataatgtctttgaagtgccggggctggctgctgataaagtcatcagcgtcttcagcggcggaaaagcgcttcatgaagacggcactcttttaaacggcgcctcaattaacgcgtcagccgccaacggattaagtcagtccgtcggctggacaccgtcattgcactgttccatcggctcatcatcaaatgtaaaatcagatgttatatctaaagccgggtcgggcatattaaaataagaaacaagaaacacaaaggaaaatattcctttgtgttttttaattaacaaaaacgtttattaacttagttaagtagtaaaatgggataggggatggaagacaacaaaataggaggagacctgtaatggcttcagaaaaagacgcaaaaaaacagcaggcagtaaaaatcattcctttgcttattactgttgctgtgggattaatcatttggtttattcccgcgccgtccggacttgaacctaaagcatggcatttgttcgctatttttgtcgcaacaattatcggctttatctccaagcccttgccaatgggcgcaattgcaatttttgcattggcagtcaccgcgttaacgggaacgctatctattgaaaatacgttaagcggatttggaaacaagacaatctggctgattgtcatcgccttttttatttcccggggtttcatcaaaaccgggctcggcgccaggatttcttacgtattcgtacaacggttcgggaagaaaacactcggcctttcttattcactgcttttcagtgatttaattttatcacctgccattccgagcaacacggcacgggcgggcggcattatttttcctattatcagatcattatccgaaactttcggatcaacgccggcagacggaacagagcggaaaatcggcgctttcttattaaaaaccggttttcaaggaaacttgattacgtctgcgatgtttttgacggcaatggcggcgaacccgctgatcgccaagctggcccacgatgtcgcaggggtggacatcacatggacaagctgggcaatcgcggccattgtaccgggattggcgagcttaatcattacgccgctcgtcatttataagctgtatccgccggaaattaaagaaacaccggatgcggctaaaatcgcaacggaaaaattgaaagaaatgggtccgtttaaaaaatccgaactctccatggtcatcgtctttttattagtgcttgcgctgtggattttcggaggaaacttaaatattgacgcaacgacgacggccctgatcggattatccgttttgcttttgtcacaggtattaacatgggaggacatcaaaaaagaacaaggtgcatgggatacgctgacttggttcgcggcgcttgtgatgctggcgaatttcctgaatgagctcggcatggtgtcttggttcagcaatatgatgaaatcttctgtttccggtttttcatggattgtggcatttatgattctgattgtcgtgtattattacacgcattacttctttgcgagcgcaaccgcgcatatcagcgccatgtatgcggcatttctcgccgtcatcgtggcggcaggcgctccgccgctgttggcggcgctcagcctggcgtttttcagcaaccttttcggttcgacgacgcattacggctcaggagcggctccggtctttttcggagcgggttatatatcgcaaagcaaatggtggtccatcggctttatcctgtcaatcgtccatattgtgacatggcttgtgatcggcggattatggtggaaagtattagggttatggtaagaagaaggcagatgcgatctgccttcttttttttgaactaagagattgatgggacgtttcacaatgtataaaccgcctgagtaccataaggttgaggtgattttatgagtgcgaaacgaaataatccgttcactgggcaaagctctcactataaatgtatgagccgtcatgtgaagagctggtatacagagcattcgcgtagatataatgaaaaaatttctgatggctgttctcacatagaaagtgataaaactccctccttttcagaaaagaatcctgcgctgtgctctcctaatagtgtacaaggacctccggggaagagagggccggcagggcttccgggctctcaaggcccccctggtcctccgggtccgcccggcggcataccgattctggcttttcaacaagctgctgatgccgccgtcattcctttggatggatcaccggcaaatattctgtccggcacagttatagcagcagcttctcaattgataaaagtagattctacggtacagctcaacatcagtcatgagcctttatccccggatttttcactgaagctgattttgtcgctgaaaagagacggaataacagtcagttcagagacgcttgaattgaatttgttttactcaggcgggcagtctctcattattccgctgacattcgtagaccaggcgccgtatgccggggccatcacgtatgatgtggtattaacggttgccggttctgttaatgtaacaggtgttaatgtgacaaaccgtgccatcaatatgatcggatagtacatttaaataggggataaacagaaatctcgcgaattgagtttccataatagataaaactgcatatgctatgttgatttgtactagcaaaaatgatgaaaggagggtatagattggcgattcaaaatctcataaacaatggaagtttcgaatccggagacttaacaggctggagcggagtgagtgcttcggttgtgtctgcatttgctcatacgggagcattctccgcccaatttgcaggcggaattacgagtgcctccttgtcacaaactgttcctgtctctccgcagcaatcatttcagcttttcatttctctcggcaaaattggcacaattgcaaaccctgaaatcaatctgagagttttatatttagatgcttcaaacgcagtggtaggaaccggattaaacataaacgtcacaataggaaacatgcctaatactatatttgatacatggactgaagtctatcaaacaacaactgctgcgccggctgcagctgttcaggcacaaattttaatcagtaaaacagccgggtcaagtaatactccggttgtattaattgacgatgtcgcatttgttgaagtaacaggaatcacgggaactacgggtccaaccggagccactggagcgacgggttcaactggggttacgggagataccggaccaactggggcgacgggaatcacgggtccaaccggagctactggagcgacggggtcaactggggttacgggagataccggaccaactggggcgacgggaatcacgggtccaaccggagctgctggagcgacggggtcaactggggcgacgggaactacgggtccaaccggagccactggagcgacgggttcaactggggttacgggagataccggatcaactggggcgacgggaatcacgggtccaactggagccactggagcgacggggtcaactggggttacgggagataccggatcaactggggcgacgggaatcacgggtccaactggagccactggagcgacggggtcaactggggttacgggagataccggaccaactggggcgacgggaactacgggtccaaccggagccactggagcgacggggtcaactggggttacgggagataccggaccaactggggcgacgggaactacgggtccaaccggagccactggagcgacggggtcaactggggttacgggagataccggaccaac

SEQ ID NO: 16 - DNA, 24630 bp, Bacillus methylotrophicus
ggcgcttcttgccaagctgaaagaaaaccgggcgcatcctgaacaagcggaaatccgttatgaagccggcaaacgtctcgtcagaaactggcgtcatctgccggcgcctcaaagcggcgccgttccgtggaaagacgaaggggtctacctcctcaccgggggagcgggcggcatcggcctgattttcgctgaagaaatagcctcccgcgtcaaaaacgccgtcctcgtattaacgggaagggcggaagcgcttgatgaagaccgctccgcccgcttacggcgcttggaagcgtcgggtgcccgcgtattgtatcaaccggttgacgtgacagacagggcggcggtcatcgccctcgtccgcggcatacaggaggtgcacggaacactcgacgggatcattcacggcgcaggcgtgatcgctgacaactacattctgaaccagacagaaaacgaacggaagaccgtcatggcgccgaaggtgaaagggcttatcaatcttgatgaagcagcgaaagatgtgcggctggactttttcatcctgttttcttccttggcgggaggtatgggaaatccggggcaggccggttatgcggcagccaacgcatttatggacgtttatgcagcccgccggaaccgtctcgtgcgggacaacaggcggagcgggcagactctgtctgtcaactggccgctttgggaagaaggcggtatgcgtgtggacaaagagaccgaacggctgatgtacgaacagaccggaatgagagccatgcgatcggcgtcaggcatccaagcgctttacgccgcttttgcctccggagaacaccaggtcatggtggcagaaggcgacgaaaaacggattcgaaaaaacctgatgcctgaaacgccggaaccgtccaatcgcattcatgtgtcaaggaagacgcccgtccatatgccgaataaagtacaagcggaactcaaacatatgatatcaggcattctgaaggtgaaagaagacgagatagatgctgaatcagagatgagagattatggctttgattcggtttcattcacgcagtttgcaaatgaactaaataaaacgtatgggcttgaactgacaccggccgtattttttgaatacccgacagtctttcgttttgcccaatacttgctgacggaacatccggatacattcggctcacaggcagaaacggagaaaccggttgtgcgtaaaaaaatgaagacggagccattcttgattccgtcccgtcttcctaaaacaaaaaccgcagctgcacctgagcccgtggcgataatcggaatcagctgtgcatttccaatggctgaaaatccggaaatgttttgggagaatttagccggagaaaaggactgcatttctgaaataccgccggagcgctgggactggagacagtattacggagatccgcagaaagataaaaatgcgagcaatgtaaagtggggcggcttcattgatgaaaccgctcaatttgaccctttatttttcggtatttctccgcatgaagccgaaatgatggatcctcagcaaagacttttaatgatgcatgtatggaaagcgattgaagatgcaggctgctctgccaaaagcctgtcaggaacaaatacaggcatttttgcaggcacgacaaacagcggttacgctcaggaagcttcaaagttccatatagagattgagggttcttccgccgccggtacggttccgtcaatcggtccgaaccgtatgagctattttctgaatatacatgggccgagcgaaccgattgaaaccgcctgttcaagctcattggtcgctgttcaccgtgcggtcagggcaattcaggccggagactgcggcatcgcgattgcaggaggcgtcaatgctattgtatcgccggatatgcatatcagctttaataaagcgggaatgctcagtgaagacgggcgatgcaaaacattttccgatcaagcggacgggtatgtcagagctgaaggtgcgggcatgattgttttgaaaacattatccgatgcggaacgtgacggcgaccgtatttatgccgttattcgcggaacggcggaaaatcatggcggacgggcggcttcccttacatcgccgaatccgaaagcacagacagaagtcatgataaaagcttatcagcaagcgaacatcgacccccgtacagtgagttatattgaagcccacggcacgggaacggcgctcggagatccgatagaaatcaacggactcaaagcggcttttgcagcgctttatcagaaagccggagtaacagcgcccgatcagcctcattgcgccatcggttccgtcaaaacgaatatcggccacacagagcttgccgccggcatggccgggcttttaaaaattattttgcagatgcagcacaaaacgcttgtgaaaagtctgcattgtgaaaccgttaatccgtatatcagcctcgacggcagcccgttttatttcgtccgcgacactcagccgtggaaagcggcgactgatgatagcggaaatgaactgccgcggagagcgggtgtcagctcgttcggatttggcggtgtcaatgctcacgtcgtgctcgaagaatatgtttctcctgttgaagagaagcaatggacggtcggtgaacttcagccgtccttattcattctctcggcaaagacggcggaacagctgaaggaacgtgcggaacagctgtgcagatatttggaaaagacacattcagctgacggagctcttgcgggtatcgcttatacgcttcagcttggccgggatgaaatggaagagcgccttgccgttatcgctgaaacaaaagaagagcttacgaacgcgctgaatgatttcctcagcggcaaggagacggggcagaatttctttacaggccggaacaaagcgatgaaacagctgtttacagagatgacggacaacgcagaaatgagcgggaccgtagatcaatggattgaagcaggaaagtatacaatgcttgcaaaattatgggtgcaaggtttacatgtcgactggaataaattatatccggacgaaaggccaaaaaaagtcagcctgcccgtctatccttttgcgaaaacacattgctggataccgcacagtgcgcagcatataaggcaccgggagacttatgagactgatacgtccccgcttgagacttatgagcgcctgcttgatgaattggagaaaaacgaaataagcatagaagccgctgtaaaaagaacgatcggtttttacagggattagcgtaatggaggaaaccatatgaaagagtttctgcaccgggttttttctgacgtcaaaaataaaaaaatgacaaaacaggatgcgatcggcattttgcgcgattatgatatgcggatgggacttcgccaagcggcttcccttcatccgcttgctcagcagcatatttccgatgaaacgggacagggattctcggcagctttcagcggccgggaattttttctcgctgatgtttctttacagcgtaaaaagcttatgcccggagaacttcttttggaaatggcgagagctgcggctgttttgacagtaaaggagactgaggctgtccggctgacacatatcgtgtggtcaaagcccattctgactgaggctgagccgttccatatcgaaatcaggctgatacccgcagagggtgaagccaaaaggtttgagatttacaatccattttctgccgatttcagtcatcatgatgtgtacagccaagggatgattcagccagttgatgctgcgcctggcatgctggatatcagccgcttgaaggaaaacagcggttccctgatggatcagcagcaaattgaagccatcactcagaacgataccgttcaatacagtgagcacatgaaaggaattgagcgtatttacgcctcagcaggacggatgctggcagacatatcaattccattgacaaaccaaaaagaatccgcccgattcggcctccctccctgtgtgatgcaaagtgtgacagaggcatgcgcgctgcttggcggcaaagaatataaaacgctcgccccggtttcattggacgagcttttgttttatgaatcttgtcctgacaaggtatgggccgagatacaagagaaggcggggagcttttatattgatttatgtgacgaagaagggaaaatatgggcttccctgtcggggttgaagctgcagcctgtcatcaagacgggcgctcccggaaaaaccaatgccgaacaccgcagtgaacgtttgtatgaacaaacgcttcttcagctcaaaacgctgtttgccctgactacaaaaattgctgtttccaacatagacactgaagagccgctggaaacctacggaatcgactcagtcactgtgacgaaattgaaccgcgaattgtctctgcttttcggtgacctttccaaaacggttttttacgaatataagacactgggatctctggcagctcactttgtcacggattatccaaaagaatgccgaaaatggacaaatgatgatgaccaccgttcaggcatatcagaacaggttttggcaaatgaagattttccggtgcttccgtcgtttatcaagcgaaagaaacggcctgctttttccaatgagaaccagacaaaagaagggattgcgattatcggagtcagcggccgttatccgcaagctgaaacacttgaagagtactgggataacttagcggccggaaaagactgtgtgacggaaattcccgaagagcgctgggaaaaggacaaatactacaaccctgatcctgaaacggccgtgaaagaagggaaaagttacagtaagcggggcggatttctgaaagatgccgctttctttgatccgctgttttttcaaatttcaccccgtgatgctttgaatatggacccgcaggagcgtctctttattgaaatgtgctggcaggtgctggaggatgccggttatacgaaggaacagcttgagaatctgtataacggccgggtcggcgtttttgcgggcattacgaaaaacgggtacggaatgtactggaaaaacggcggcgccctgcagccgaaaacgtcgttcagttcagcggccaacagagtttcctattttcttaatctgaaagggccgagcatgccggtcgacacgatgtgctcatcttcgctgactgcaattcacgaagcgtgtgaaaacatccttcgcggcgaatgcgacatggcgattgccggcggtgtgaatgtgtatacgcatccttcggcttatgcggagctcagcgcctatcgaatgctttcaaaagacggaacgtgcaaaagtttcggtgaaggcggggacggatttgttcccggtgaaggtgtcggggccgtgctgttaaagccgctgtcaaaagcgatggctgataaggaccatatttacggggtgattcgcggcactcatatcaatcacggcggcagaacaaacgggtatacagtgccgagtccgagcgcccaggctgacgtgatttccggcgcgcttgaaaaatcaggaatacatccgcggatgatcagctgtatcgaagcacacggcacgggtactgaactcggagatccgatcgagattgacggtttgacccgcgcatttcaaacgaaaacgtctgataaaggtttttgcgccatcagctcagttaaatccaatatcgggcatttggaagccgcggcaggcattgccggtgtaacgaaactgctgctccagcttcaaaaacgaaagctggctccctcattacattgccggaaattgaatccgaatattgcattcgaccggacgccgtttgcggtgcagcgtgaattggcagactggaaacggccggtcattgaggaaaacggagcgcaaaaagaggttccgagaatcgcgggaatctcttcttttggcgcgggcggggcaaatgcccacatattgatagaagaatatattgaacctgatagggagatttatgagccattcacagatgaagatcccgcagtcattttattatccgccaaacaggaggccagcctgaagcagcgggcgcagcagcttcttcaagcgatcagaaaaaatgacgtcacagaccgcagcctccgggatgcggcttacacccttcaaaccggaagagaagcgatggaagaacgtgcggcgtttatcgtgacgtcgacagagcagttagcggaaaaactgcagcgttttattgacggcgggacagacggctgcttcaggggaaaaagcaaacagtataaagacattctagccgtttttaaggatgaagatatgcaggaagccgtccgtaaatggatgaaaagaaaaaaattcgcgaagcttctggaactttgggtaaaagggctgaagattgaatggtcagagctttataacggcagtctgccgcatcgcatcagccttcccggttatccatttataaaggatcggtattggccggacgatgcagcgccggacaatgttcgtgatgctgaatcacattctgaaacatttcgtgaaatccgctttttacagaaaagctgggcagaaagcagccgtgttccggctaaggaagtgcggggcgtcatcggaatagctgctgatcaccagacaggaaatttagccgttgagctgtcccgttatttccccgagtctgaaatcattgacgctgcatcaccggaaatatccggggacgcggcccgatttggcggtctgattgatgtgaccggatgcgggacggaaatcaatcatgatgacggctggattcatcgtctgcagtctctcattgacaacagaaaccgcggccgaaagcttcagctgctttgtgtgacaaaggggcttgaaccttttgcaaatgaaacgataaatctctcaggtgcaaaaaaggccggattgtaccggatgctccaaagtgagtataaggatatccgctcgcggcatatggatgcagaacggactgccgaagatcctgagctggcaaaccagatcgcagaggagttttttcgcgattctgaagacatcgaagtgtgttaccgaaacggtgtgcgctatcacgcgcggttaaaggaaacaaacagcttagctgaaaaagaattttcatttccgaaagaccatgtgctctggatcaccggagggacccgggggctcggatatttattcgcctggcattttgccgaacgatacggagtcacgaaactcgtgcttaccggaaaagaaacaatgccgccgaaagcggagtgggatgatcatatcaaacggaattccccgttttccgaaaaagtgagaagaatcagagatctcgaacaaaaaggtgtccgaacggaagtgctgtctgtatcttccggccctgaatatgagcaggctgtcagccgggtgaaagagaagatgggcccgattggaggcgtgatacacgcagcgggagccgtagatctcgatcatccggcctttatccgcaaaacgagagaacagatgatgaccgtgcttgaacctaaaacagacggactggaccttttgtatcaagcgctgcacaaggagcctcttcggttttttgcgctgttttcttcagtgtccggcgtgatgccggaattaggagcgggacaaagcgattatgccatggctaacgcctatatggattattttgcggccgcaaaaggttttccggtgctgagcatccagtggccgagctggaaagaaacgggtatgggcgaatcaaaaagccgggcctatcagaaaagcggtttaaagagcatcactgacagagaagggctgagcctgtttgatgccatcatggcaggcgattgcggatctgttattatgccggccgtcattcacccggaaaaatgggagcctgaccgtctgctgctttcatccggccttactgaaacaaagcagcaggaacaggccgatacagaaagcgttgaggagtggctgacgggcatttgctgccgggaattaagactggagccgtcaagatttgaatctgatacaccgtttcaagattacggagccgattccattatgcttgctcaagtgtccagagcgatcggaaagaggatcaaagctgaccttgacccggcggtgctgtatgaataccctacggttgctgagctggcgggatggcttgaaacagcatatcccgaaatcaaagatgccgtttcaaaaccggttcagcctgaaatcccggacgttcccatacaaactgcagccgctgtcattcagccttctggcgctgcagcggcgcaagacatcgctgttgtcggaatgtcctgccgttttccgggagctgaatcaatcgaagcttattggaagctgctgtctgaaggaacgtcagccattcaaagggtgccgaaagagcgctggaaaacggagaaggcggattatgcgggccttttacaaaatgtaacgcattttgacccggagtttttctttattcccgaagaagacatcagggcaatggatatccagtcctttcttatattagaagaggcgcttcatctgttcagagacagcggctactctttacaagaaatgaaaggcaggtcagccggtgtctatttaggaggacgcggcggcagtatgcctgacgaaaaccgtctgaagcatgcaaaaaatccgatagtcgccgccggcccgaattacttggcggccaatctttctcagttctttgatttgaaggggccgagtctcgttttggatacggcctgttcttcagcgcttgtcggtatgaatatggcgatacaggcgctttcttgcggtgaaatcgactcagcggtagtcgggggagtcagtctgctggaatccggtcaaacccaccggatgttcgaacttcgcaatctgttaagcgaagagcctgcgtttcatatttttgaccgccgcaccagcggcatcgtattgggagaaggcgtcggaatggtgtatttaaaaacagcggcccaggctgtaaaagacggggaccggattcatgcggtcattaaaggcatttccgtaaacaatgacggcagaaccgcggggcctgccacaccgaatatacaggcgcagaaagaagtgatggccaaggcgcttgccaaaagcggcagaaaagcggaggatatcagctacattgaagcaaacggttcaggctctgaagtaacagaccttttggaactgagggcgattgaagcggtgtaccgtatgcaaaacagcgcgccttgcgaattggggtcgatgaagccgaatatcggacacccgttatgcgctgaagggattgccggattcattaaaacagtgcttatgctctcgcgccgaatgcgtgtgcctttcctttcgggcaaagagccgatgacgcattacgatctgtccgcatcgccgttttatttttcgcacgctctgcgtgaatggacggattcaccgcggattgccgccgtcagcagtttcgctgacggagggacaaatgcccatgtcatagtggaagcctgggagcaagaggcgtataccccggttagaaagcctttgccgagacaggaattaaaacgccggcctattcgtccggacaaagccgaaagcctgcatggaaacgcacataagtcccgtccgaatacgttttggaaacaaatgaagacttactgattgcgctgaaaattgaacgtcgatatggaggaagttcatatgcaagagcagcttcttattaacaatcagcatcccgttctgaaacatcataaagcctatggaaaggaactgctgccgggtctggcttatattgacctgatctatcagactttcagagaaaacggtttttttcatgccggccttgaactcaggcacttatcgatttttcaccctttagctcctgaacagggagaaacaatcctgctttccattgactgtacagagaacggcgaagggcagtggaaggtggaggtgaaagggcaaaaacaaggtgacgaagcagcagagacaaaggtatatgccgcggcgcaaatgcattccgtcaagcccgccggcttccaagagagcgtccggatggatgccgtaaaacaaacggcggcagaaataccgcttgaggacatttacgcggaatgcagggatcaagaactggttcactcaggaatgatgaaaggctgcggaagcgtctaccaaactgaaaaagagatttatattgatctgtcggtgcaaaaggatcagctggaacatgcagaagaggcgatgtttcatcccgcattgatagatgcgagcagcatcggctccaatgtatatctcgctcctttgacgagggaggaggggcaattatttctgccgctgttttatgaatcgttttattgcaccgaattgctgcagacaacatgtatcaccaagataaaaaaagaatccgtcacccgtaagaaagatctcgtttacgtgacaatggagtttttcaatgaggaaggcagaaaagtcggcgaactgaaaaacttcgccaataaactggtgagggacccggaactgatcaatcagaaacggcaaaagaaagaacctgacgggcggaatgccgtcccggctccgcaagcggaaccggcgccttctgagccccgccgtgcggaggcttccgccggccttactgaacagtgcatcctttatttaaaagaattgcttgccgcccgattgaacaaacctgtgaaagagattgacccggatatcggctactatgaaatggggctggattctccggggctgttggacatggtaaaggaaattgaacgaaaaatcggaacgcagcttctgccgacactgttatttgaatacacgacaatcgcggaattggcgggatatttgtgcgaacattacggagccggtttcggccatgctcaaagcgggcattcaagtgctgagcctttgccccgggaaaaaaagaggacgacccaaatccgcgtgaaaaaatcggcgtcagccggaacgcagaatggagatattgcgatcgtcgggatggcgggacggtaccccggcgccaaaaatcttcgtgaattttgggcaaatttaaaaaatggagaaaacagcgtaacggaagtgcctcgttcccgctgggatacgaggacatatgagcatttgcgatcgccgtccggcaagccgatttccaaatggggcggttttatagacgatccggattgttttgatgcgaaattttttcggatttctccgcgggaggcagaagctaaagatccgcaagaacgattgtttttagaaacatgctgggaaacgattgaggatgcaggctacaccccggaaacaatcgttcagccgaaagggccgaataagagaatgaacgtcggtgtgtttgccggggtgatgcatatggattattctctcgccggcgctgaagctgcggccaaagggctggtctttccttatcccttgaactatgcgccgatcgcaaaccgggtttcatatttttgcaattttcacgggccgagcatggcggttgacacggtgtgttcgtcatctttgacggccgtccatatggcggcggaaagtctgagacgcggtgaatgtgaagcagctcttgccggaggcgtcaatttatcattgcacccgacaaaatatatcacatacggcttgatggatatgcattcgagtgacgggctgtgccgcacgttcggcgaaggaggcacaggctatgtctcagctgacggcatcggagccgtgctgctgaagccgctccacaaagccgaagaagataaggatcatatttatgcggtgataaaaggcagcgccgtcaatcacgtggggaccgtcagcgggattaccgtgccgagccccgtggcgcagggggatatgatagctgaatgtcttgaaaagacggggatcgatccccggacgatttcttatgtggaagcgcacggaaccggaacttctttaggagatccgattgaaatacaaggtcttgttaaagcttaccgcacgtttacggaggatcggcaattttgtgcgatcggttccgttaaatcgaatatcggacatgcggaatcagccgccgggatcagcgggcttcataaaacggttttgcagctgtttcacaaaacgcttgtcccttctttgcactcagagacgattaatccgtatctccgtttagaggactcgccattttacgtgcagcaaaaaaccgagtcatggaaaaggccggcgtatacagagaacggccgtgaacatgcctgcccgagacgcgcaggcatcagttcattcggggcgacgggttcaaacgttcatctcattttagaagagtacaggcctaaaaaccccggtattacggaggatcaagagagaccgtatatcgtgcctctatcagcgaaaaatccggagcggctgaaggaatacgctgcccgcctgctgatgtttctcaaagataaagcgcttgaaggaagcggtccgcttcatgacaaaagagatacaatgcaaaatcagctggaaaatgcgttgcgaggtgttctggccgaagttctgcatgttgcggccggctcggtagatgatgaacaggattggaaggaattcggcttggatgtcatgcagctgacacatttttctgagctgatgacggatcaatacgggctggcaatagacatgactgatctcatacagcatacttccgtccggactttagcagaatgtcttacaaacgatgagaaacataagaatattctttccggtcttttcggccagtcgggcttagataagcagcctgatgaatctttttccttgcggtcactggcgtatacgctgcaaacgggacggctggcaatggaagaacggcttgtttttttagtgaacgatcaagcagacctgatcaggaaattaactgaatttacagaacgaaaacagcagattgacggctgctttcaagggcggtctgatagcggaacggaaatcaggggtttcctgaatgatgatcaggatacggaggagctgatccgaaaatggatggacagcggcacttacaaaaaacttgcggagctgtggtcaaaaggatttgagatagactggacgcggctgtatcgggaggagaaaccgcgcaggatgagtctgccgacgtacccttttgcaaaggaacgatattggataccggagcccgatcatcccgtcacttccgtaaatacagaaagcaggcttcacccgctgcttcaccgcaatacatcagatttgctagaacaaaaattcagtacgatactgaacggagatgaattcttcttagccgatcatatcgtccgaaacaagcgtgttctccccggggcggcttatcttgaaatggcgagagccgcagctgaactggctgccgcgccgttagccgctggatacacggctaaaaccggcatttcgctgcggtatatcagctggatacgccaggccgttcataaaaaagagccgctgcgtatgacgacagggctttctttggaggataacggcaatgtttcatttcaagtgtacagcaatgaaaatgattcagacatttattgtgaaggaagcgctgtgattgagccgctgtctgaggcgccggttttgcatattgaacagctgaaagcgcgatgccgcaaaaaagtgctgtcaaaagaagactgttatgcggcgtttgcaaaggcggaaattgtatacggaccttcacatcaaggaattgatcacatttattgcggggaaaaagaagccttggctaaattggtgctccctgcttccgtttctgatgaggctgaacagtttgtgctccatcctagtctgatagattctgcttttcaggcggccatcggcgttatgaatgaagatcaagcgggttatccggagcagccgttaatgccttttgaattgcatgaactgaccgtttttcatccgtgcagtccaaacatgtgggcggccgtatttgtgacgcatgaaacaccggccgtacgaagaatggacattgatatatgtgatgagcgcggcaatgtgtgtgtaaggataaaaggattttctgcccggatggccgaaagtgcgccggccgtaaccgataataagcaatacgatctcccgggtaaccttaccggagccgtcaaactgatgcaggtatgggacgcggaaccgatagacaaccaaaccggcttccccatttctgaagcaaaagctgtcatcataggcggtacagacgggcaggcggacgcggttttacgattgtttcctaaagctgtgagatttgatatcggccaaagtgcttccgttgaagtgatatctgatcggctccgccgtctcggtgagattcagcatatgatctggtttgcccctcagccggctgattctcacagccatgatcaaaaaagcggggtgctgcaaattttcagagcggccaaagctcttatcggtctcgggtatggaaaagagcagctagggatgacggtgattacgcaccaagcacagcctatcacccaatatgatgaggtgcgtcccgctcattccggtgtgcacggttttgtcgggtctctcgctaaagaacatccgagctggcacatccgtctggccgatcttgaagacgggggggatttccccgcagaagacatattcagcctgccccgcgaccgtacgggtaaagcatgggtgcgcagacatcaggaatggtaccggcctcaattgcttccggtccaaagcgggccgtctgaaagtgttccttaccgctatggaggcgtatatgtcatcatcggcggtgcgggaggcatcggcgaggtttggacagattatatggtgacgacgtataaagcccgagtcgtctggatcgggaggcggccgctggacagccggatacgccaaaaaatagaccggtactggtcatcaggcccggctcccgaatatatagccgcagatgcttctgattttccatcgcttcagcgcgcctatgaacagattaaaaacacatacggcaccatcagcggcgtcgttcattcagcgatggtatttgcgaatgaaagcgtaaaagatatggaagaatcacagtttcacgccggccttgcggcgaaagtggatatttccgtcaacattgccgaagtatttgcgaaagagtctttggactttattctctttttctcttcggttatttcatatattaagaatccgaatcaaagtcattatgcggcggggtgcgcatttaaagacgcatttgcccatgagctttccggacggctgtcatgccgggtcaaagtgatgaactggggttattgggagcgggctgacaatcacatttctgaagagtttgacagactgagtgcaatcggtctcgggctgatcagccgggcggaagggatgcaggcgctggaaactctgctgacgcagccgatctcccgcatggggctgatgaagctgaccaagccgattccgatcgagggaatgaaccctcatgaatttgtgactatctgattgcctgtcaaaatgacggagcaaatttaattttcttaggaggataaggttttgggtaagggagacaaacaaaaagaccgtacacagttatccttaagaacagaaataagcaatcaaatgaaagaattgaatcggcttttgctgcaagtgctgcggatgacgctgcgttcaatgggtctgaccggcgaagcgccggcggcttcctgtctgcctttatatgagcgctggctggaagaaagcatccgtcttttagacagcgattttaaaagcggtaaaacggccgcggtttgggaagagtggcataagaagaaaaacgaatggctgaaagatccggatatgaaagcgcaggctctgctggcggataccgtcattcaagctttgcctgacattttaacaggcaaaataaaagccactgacgtgatgtttcccgattcctcaatggagcttgttgaaggaatctataagcataatattctcgctgattattacaacgatgtgctggcaaatgaagcgtgtatgtatgtggaaaatgtaatgaaaaacaatcctgaggcaaacatccgtctgctggagatcggagcgggcaccggcggaacgagcagcacactgtttaaaaagctccgcccctatcaaaaccatattcaggaatactgttataccgacttgtcaaaagcttttttaatgcatgccgaaaaggaatacggcgcggacaatccgtatttgacgtatcagctgtttaatgtggagcagcctgcggcgggccagggattacatctgagaacctacgatatcgctattgccgcaaacgtgctgcatgccaccaaaaatatccggaaaaccttacggacggcaaaagccgtattgaaaaaggacggtttgctgcttgttaatgaactgggcgggcatacgccgtttacacatgttacattcggcttattagagggctggtggctgtacgaagacgaggcgctgcggattccggggtgccccggtctttatccggaaacatggaaatccgttttaatggctgaaggttttcattccattcaatttccggctgaaaacgaacgtctgcacacccagcagattatcacggcgaaaagcaacggagtcatcaggcagagcagggaagcttacaccgcgcaaaagcgccaatcaaacgtaccgcaaacatcctctgatcgtcagctccccatcaaacaagcgggagaggggctttcggaaaagacagcggcttttctgataagggctgtggcaaaagtattaaaaatgccggcagaagagataaatccgctggctcctctggatgaatacggcattgactctattctgatcgttcagctgacgaatgagctgcgggatctcgtccctgatatcagcagcacgctgttttttgaataccggacgataggagagcttgccgcattcttggctgaaacgaaggagcgcgaactgcatgcgcaattttctgaagaagtccctcatactgaagcggcatcatccggctctttgcttgaaaaaagcacagagtacctgaaacagatcgtcagcgccatcttaaagatgccgattgaggacgttcaagcccatacgccccttgaagaatacggaatcgattccatcttaatcgtacagctgaccaaccgcgtgcgggaagacatacctgatatcagcagcacattgttcttcgagtatccgacaatcggcggattagcggaatatctcgtcagctcaagacaggaagatatggctgggattttcaagacaaataaagaagccgaaaaggcgccgcacattctacagaaaaagcaaagccgcaaaaaaagcgccggattgacgaagcgccaagcggcatctttttctgaaaaagcgccccccgcttccgaaccgccgtcaaaacaccttgaagtggcaattgtcggtcttgccgggaggtatcccggagctgaaaatgttaatgagttctgggaacggttaaagaccggtgaacacggaatcaccgaaattccgaaagaccgctgggattggcgggactactatgatgagacaaaaggtaaggaaggccggatgtatacaaagtggggcggatttttaacaaatattgataaatttgatccgctgttttttaaaatctccccgaaagaagcggagcgcatggacccgcaggagagactgtttctggaaaccgcttatgcggccctggaggatgccggatatacccctgattcactatgcgccggtaaaaaggttggtgtctttgcgggtgtcatgaacggcaactatccgacaggggcccactatcactttatcccgaaccgcgtatcctatgtgtttgattttcacggtccgagcatcgcggtcgatactgcatgctcctcatccttaaccgccattcatctcgccgcagaaagcatcagaacaggtgcatctgaatgcgcgattgccggcggcgtaaacctgattacagatccggttcattatatcggactttcttctatgagaatgctgtcaccgtcaaacgcgtgcaaagcgttcggtgataaggctgacgggtttgttgacggagagggcgtcggctgtatcgtgttaaagccgttgaaaaaggctgttgaagatcatgatcatatatacggtgtcattaaaggaagcgctctgaacgccggcggcaaaacgaacgggttcaccgttccgaacccgaatgcacaaggagaagtgatcgcagacgcgatggagcgggcagggattgacccgagagcaatcagctatctggaagcccacggcaccggcacttccttgggagatccgattgaaatcgcagggttaaccaaggctttccgccgctatacggatgcaaaccaattttgttccatcggttctgttaaatccaatatcggacacctggaaagtgcggcgggcattgctgcggtcaccaaaattcttcttcagatgaaacacggatatctggtgccgtcgctgcattcaaagcagctgaacccggaaattgattttgaaacttctccttttatcgtgcagcaggaaacagcggaatggagacggccggtcatagaatctgaaggagtaacacgagaatatccgagaatcgcgggtacatcttctttcggagcgggcggagcaaatgcccacctgctgatagaagagtatgaaccggctgaaatgacttcggcagacaccggccgtccggcgctttttgttttatcggcaaaagataaagaccgcttgcgcgagcgggctctgttgctgtcggatgccgccggacacggaacaattacagatgcgaatctgcttgacgcggcatttacccttcaagtcggcagggtcccgatggaagaacggctggcgatgacagcggactctgtttctgaattggaacagaagctgattgcttttctgaataatgctggttccgtaagcggggtgtttacgggccggagtgatagtgctgtcacggagacggaaggcactatcagtgattggatggaaaaacgtcaatttgacagtcttttgaatgcctgggttcacgggacgcccgtcgattgggcatctttatataaaggcgcgctgccgcatcgtatcagtctgccgtcttatccatttgcaaaagaaagctactggatgaagcgggaagaaccaaaaacaggaacaactgaatatgtgcatcctttcctgcatgaaaatacgtcaaccttggcggagcaaagctatcatacatcttttacaggccgggaacacgttttccaggatgtgagcggggagcgggttttgtcggcagccgtttatttagaaatggcgcttgcggcttttcatcatgcggcagacagctctgaagaaaaagagatatggatccgaacagcggcatggactgacccgattaccggcggacttcacggtgcgggcgtcaatctctcccttctgtctgaagacgaggaaggcatccattatgaaatatacagtgacgaagagaagctgcatcattatggaatcatcggacaagggaacatacagccatcccgcgtgcttgatattgcctccttacaaaaagactgccgcccgctgtcattcgattatgaaacaccaggcacatcaggtgtaacgatcagtaaggagttccgcaccgttgaaaagctttatgcgggagaaagtgcggtttgggcgaagcttgctcttacagatgaaagcggctgtaatccgggatatcatctgccgccggaatttctggacgcagcttttcatgtcctggccaaaacggagccgtcagtccatatcgtgcctgaagcggttgaagaactgcgcgtcatgcgtccgtgctcatccggcatgtggatgtatattaataaaaagaatcaaaccggctgtgacattcaattttgtgacgaaaccggcactgtctgcgcagaaatcaaagggataagaatgagacagccgtctcagcaggatcacgggcaagaggaacaatccgagatgatgatatttgaagaaatgtggaagcagcagcctctgaagaaatctattcatgaagagctgaaaacggtcatctgttttcttacgggagaagctgccagaaagcatgcttatcagtctttacaaaccctttttccgggagccggcgtgttttttatttcacagggtgaggaaactcaaaagctttcaaacacgcattatcaaattaaaatcactgacgaacaagcatatcaagaaacgtttcggcatattgaaacggctgcaggcaaagcggatgccgttttatatggatggccgcttgaagatgaaaaggccgtgaaagactattccattctgtatcatgtgatccgcgcagctgcttctttgcgttctaaaccgaggcggatccttctttccgctcagtgcgggaccgataccgatatcagttacgctgagtcatggatcgggctggaacggtcgctgaaactgatcttgccggagacggatacggccgcggtttattttgaacaaaaaggaccgttagaaaaactgatccataacgtatgtgaagaacttcacagcgagtcgttccgcagtgtcatgtacagtggggaaatccgtcgcgtcatggaaatgaagcagacggatattgcccctggcgagaagcgtgtgataaagagcgggaaaacgtacttgattaccggcggatgcggggggttaggcttgttatttgccggatatttcgctgaaaaaggaccggttacgctcattttgacggggagatcagcggcagccggcccggtgctgaacaagataaagagattggaagcatcaggctccaaggtgttttacgtgcaggcggatgccgcagatcaggctcagatggagaaaggtttgcaagaagtgaaagagaaaggatgcgggccgattcacggtgtcattcacgctgcaggtcttcaaggcactgaaagcattctggagaaagatctgcaaacctttcagcaagtcttatcgccaaaagcggacggcaccgcggtgttagatcaggttctgtcacgggagccgcttgacttcttctgttgtttctcttcttcttcagcgattttaggagacttcggttcttgtgactacgcgatggggaaccgcttccaaatggcttttgtccgtcatcgggataaacttgtgagcctcgggctcagaagcggcaagtcacttgcaatcaattggccgctttggaaagaaggggggatgcatgtcggcacggcggaaagcaccgatatgtatttaaaatcaagcggacagcgttatttatacactgaggaaggactcgaagcttttgaaacattgttagtccagccgtccagccagtatctcgtcctggccggttttccgtcgagggccaaacgcttcctgcagatagatcaaggcgaacggccgatttcgggttctgtaaacaggaacgtcccgttttcaggaaggcggagtgaaatgaaaggctttacactggaagaatgcgtaagctgggatgtgaaagaactggcggcggggcttttgaaaatagacaagaacagactgacggacgctgacaatctggctgatttcggctttgattctatcagtttggcggaattcgcctcttctttgtccgctcattacggaattgaagtgacaccggccctgtttttcggacattccacactggagaaggtcgtccgctattttctgacggaacacaagtccgtcatggagcatgtctatgaagaaaagaaacctgaatccgcagatcaatctgtctttgaaaaggcaggaacggaaaagcgaaagaagcagaggggaagaaataagctgaacgccggaaccgagggcagtcaggcagctgattccattgccattatcggcatgagcggccgatttcctcaggcgcgcacggcggacgagctgtgggacattctgtttcaggaaaaggacgttgtcgcaccggtcgcaaaaaaaggcttcacaagttcaaaatggaaactcggcgctgtaccgggggcggacgaattcgaccctttattttttgaaatatcgccgagggaagctgaaacgatggatccgaaacagcggctgcttcttcaggaagcgtggagggcccttgaggacgccggctacggcgccagtcacatcaagcagcagacgatcggtatgtttgtgggggcggaagaaggagattatcaccttttaacacgggacaaaggcaatgtcacgtctcatcataacggtattttggcggcacggctggcttatcacttgaatttatcaggtcctgtgatggcgataaatacagcatgttcttcggggctcgtttctgtccatcaggcggtattaagcctgcagaataaagagtgcacaacagctgttgcggccggggtgaatatcatgaataccccggacttttttgaaacgatagataaagccggaatgctgtcggaaaacgggaaatgcttcgcgtttgataaaagggctgacggcatggttccgggggaagcggccgcggcggttgttctgaagccgctgagagaggcggaaaaagatggtgatccgatttacggggtgattcgggcgagcggcatcaattatgatgggaaaacaaacggaattaccgctccgagcggcgtcgcgcagacccggctgcttacttccgtttatgaccggggccgtatcaaccctgaagatatcgaatatatcgtcacacacggcacaggtacaaaactcggtgatccggtggaaattaacgcgctttatgacgcattttctgcctatacaaacgaagaagcattttgcgcgctcacatcaattaaaaccaatatcggccacacgtttgccgcatcaggcattgtcagtttgatcagtcttttacaggcgttctcccgtgaaatgattcccgccagtctgcattgcagcggggaaaaccgctatatcaactgggagaagagtcctttttatgtgaataaaacgggtaaaccgtggccttctctgccgggtaaaaaccgaatgggggcagtcagcgcattcgggatgagcggaacaaatgcccatatcgttatggaaagctataagcgcagtgcttcacctcatccggatgcccctgcatatttactgactttgtctgcaaaaacaaaggaggcccttcaggaaaaaatcgaagatatgatcacttgggcggaaaatggcggactgaaagaaaatgatctggcccagctcagctatacgttgttaaaaggacggcatcactttaaccatcgcgccgccatagtagtgcaagatgctgatgacgcagtgtatgtatggaagcaggcaaagcttaatgaacatcatccttatgtgttttcgggaaaagtaccgcagcactttgcagggcgtcagcatattcaggagcacatgatagaagtgctcggcaagtgcagcgcctcatattctgaccatagaaaatatcaggagctgttatgcgtgctggcagatttttattgtcaaggttatgaaatcgaaggggacttgctttatggcggacctttgccgcgaatcggcaatctgccgggctacccgtttgccaggcagacgtattgggcgtccgatcgtcttcagagagagattggaagccggaattcagctgaacgtgaaaagcttcacccgctgctccatgcgaatacatcgacctttaccgcccagcgttttacttctgttttttcaggatatgaaccgttttttgccgatcatatcgtcaatggaaaaccggtgcttccgggcgcggctgctttagaaatggcccgggccgccgttacatttgccgctgaagacttgcccggcgggaaaacgggtgtcaggctcaaacagatcgtttggctccgtccggtgacggcgctttctgaaggagtgacgcttcatgtaaagcttcagccggaagaaaacggagacatcgcttttgaagcgtatgccgaaggagaagagccgcttgtctttttccagggaaaggccgtgctcgaagagacggagcgtgctcctgttctcgatgtggaagcggttcaggcgcgctgcagcggccgtcacttgtcaaaggctgagtgctatgaagcgttcgacagcctcggcatcacctacggaccgtcgcatcaggcgcttgacgccgtctatgccggaagcggagaagtgctcgcgaagctcactcttccgccgtccgcccgcgaggaaaaggagccgttcatcctgcatccgagcatgctggacgccgcccttcaggcttctatcggtctcgtgctctcagacggttccgcgtccggacggccgtttctgccgtttgccctccaggatatgcaggtgttttctgcgtgccgggagacgatgtgggcggtgctttcctcagcggacggcgcctatcatattgagctgtgtgatgaaaacggcgcggtatgtgtccgattgacggggctcaccgcccgttttctggaagaggaaacggaggaaaaaccgctcttgcttcagccaaagtggcaggaatcaccgccggatgaaggcggcggacaagaagcgtctttcagatacgtgacgctgtatggcggaatgaacgctgaggacataagcggcgccgtatgtgcggctgacggcgaaggtccgattgaagaccgttatgacgcctgcgcggcggagctgtcagcgatcgtcacgcgtcttatcaaagaaaaacagaagaaaaaaacgctgatccagcttcttgtccccgacaggggggaagacaatgtattggcggggctggccgcttttctgaaaacggctcaccttgaacatccgaagctgtacggcca

SEQ ID NO: 17 - DNA, 21212 bp, Bacillus methylotrophicus
gtatcaaaaagctgttaaaacaaaaggcattaccatgagcatgtcccgcaaagggacgcccgctgataatgcctccatcgaatcgtttcattcctcgctaaagtctgaaacgttctatcttaacagcattgatcgaactacgactgccatcgtagaacgcactgtcatagaatacattcattattataacaatattcgtattcaaaccaaactaaacaaccaatcaccgataaactatcggcaattggctgtttaaaaggtgttttgacccctgtctcaaaaacggggggcagtccccaaatgaatggcttttttctgtttttccggcaggattcgcccctccataaacagaaaacagggagcagaaacggatcatgggcaccggtactctcaaggtgcaatatcctgactcttggggtttcgtcaattaacataacgggcggtgaaaaaatggagccaaaatggcttgaatgggcaaaacagcttcaatccgcggcgcaagcggggctggcttattccaaagacatatatgatattgagagatttgaagaaataagaaaaataagcgtggatatcatggcgcatcataccggcaccgacaaaaggatcatcaaagacgtattcgccggtgacacgggctatcccactccgaaagttgatatcagagcggcagtttttaaagatcagagcatattaatggtaagagagaaaagcgacggcagatgggcgctgccgggcggatgggctgatatcgggatttctccgggcgagaccgctgtcaaagaagtaaaagaggaatcgggaatcgaagtaaagcccgttaaactgttagctgtaatggataagaaatgccattcccatccgccgtccgccgcccacgtttacaaagtgtttatcaaatgcgagatcatcggcggccggatcagggagggaacagaaacaagcgccgccggtttttttgcggaaacggaactgccgccgctatctgaagcccgcaatacagaaagtcagattgaaaagatgtttgcgtatctcaaacatccggacgaacccgtttattttgattaaggcagcaatcagaaagaaaagggggcccgagtataatggaggattcaattaaacagcaggcgcagcggcaatttgccaaaaacgccgcgaaatatgtgactagtccaggacacgccgcaggagaggatttggcgtatctcgtttcagcctccggtgccgaaaagcatatggacgtgctggatatcgcgacgggaggcggacatacggctaacgctctcgctcctctcgtacgctctgttatcgcctatgacctcacggaagaaatgttagcagccgctgaagcatttataaccggaaacggatggacgaacgtgtcattcgaaaaaggcgatgctgaaaagatgccgttttccgatgctgctttcgatatcgtcacatgcagaatcgcagcgcatcattttcccgatgtcagagcctttgttcatgaagcgtttcgggttgtcaaaccgggcggcagactgcttctcattgacaataccgcacctgaaaaggatgaatatgaccatttttataatgacattgaaaagaaacgggatcagagccactttcgggcgtggaaaaaaacagaatggctccgttttctggagacagccggcttccggattgaatccgctgtctgctttttgaaaccatttcaatttaccgtctggtgtgaacgggcaggcctgactgaagagaaagccgcattactggaaaaacagatgctggatgctcctcgtgatatacagcggtttttttctgtagaaaaggatcaatcaggccgtattgcgggcttcacaggtgaatcggcctgtttctgcgtgatccgtcccgtctgagacgaaaaaaaccgctgtgcagttttcctgcccgcggtttttttcgtattatctgttcttgatttgagaaataatagcggaagtgacatcttccgttgaatgttttccgccgacatcaggagtcagaatgccgctgtttgtgaccgtttcaatagattgtaagaggagatgacccagttcctcttctccgaatgaatcgagcattaatttcgccgtccatatttggcctataggattggcaattcctttcctgacaatatccggggcggagccgtgaacaggctcaaacatggaaggatatttgccgtttacattgatgttggctgcgggagcgattccgatgcttcccataatcgccgcgccgatatctgtcagcacatctccgaacagattcgaagcgacaatgacatcaaagcgttccggctgcgtgacgaagaaggccgccagtgcatcgatgtgctgggaatccgtctcaatcccggcgtactcccggctgacctctttaaagatgtcatcccagaacggcatcgagtgaacaataccgtttgatttcgtcgcgcttgtgacgtgtttccgccgacttgccgccagttcgaaagcataccgcatcactctttccgtaccccggcgggaaaagaccgcgttttgtatggcgatttcgtcctcaccctgatagattctgccgccgacagagctgtactcgccctcactgttttcgcggacgactatcagatcaaaatctttcgggttaacgaggggggaagtgattcccggcaggagcttcgccggccgcacattaatcacctgttcaaattcccggcgtatcttgatgagcagcccccacagcgaaacatgatcggggacgagtttttgattccccaccgctcccaaaaacaaagcatcaaagtgctgtaacctttctaatccatcatccggcatcatagtcccgtgctccaaataatactcgcagctccacggaaaagaagtgaaatcaaagacaatgcctccatgtaattcggcgatcgcgttcaacacccgctccgcttgagggactgtttctttccccacaccgtcccccggtatgctggcaatcttgtatgttttcatgtttccgtcacctctgaatgaattgttttcggtttacggcagaccgtcgaccgtcgttcatcataattccatattacgccacatccgatatgctgacaagctcgggaatgttgcttccatagataaactgttatatgatcttggtaacaataaggcctaaattgtatgaagaggtaggaaagatggataattttaaattagataagccaatcccgtattatctgcaattttattcccaattgaaaaaaatgatatttgacgggatttttaaaccgggtgaacggctgaatgagactcagctggccaaggatttcggagtcagccggtcgccggtcagagaagccatgcggctccttgaaaaggacgggcttctgacggcagacgatcgaaacggctttgtcatttattctttgtccgttaaggatgttgaagagatttataaaatcagaatgtcacttgaatcactggcggtcgaactggttattgatgaagcggctgagagtgaaattgacctcattgaaaaacagctgcgggagacggaagaagccgtcaataaaggcgtcaaagagactgagattatttccttaaacgagtcgtttcatcggctccttgtggatttcagccgcaacagccggctggccatgctgcttgagcatgtcaatgtgctgattcatttttgcagagttcttaattttaaaggagatgaccgtgcggaagttattctgcatgagcaccggaaagtctttgaagaaataaaaaagggcgacaaaacaaaagccgtgcaatatatgacggagcatctcaagcatgatgaagaacatctgaaaggcgtgctgagagcggaagaaacagacgaatcatcacgatagacaaggcgaaatgccttgtcttttttttgccgatgtcatcgaaccgtcataaagacctgacggatgttccttgcatgattttttccgcgtcatttatgatggatatggaagagacacaaaaaaggcaaaggagattgaaaaatggcgaaacatattctgatgatcaattttcctgcagaaggacacgtaaacccgactttgggtatgacaaaggccttcagcgaacggggcgatcacgttcattatatctcaacggaaaaatacaaaagcagactggaaggagtaggggcgaaagttcatcttcacagcgatctgctcagaatgacacccattgatcccggcagtccgtccggcatacttgcatttttaaaggttcatatcaaaacgtcactggagattttacatattgtgcagcggcttgcagaggacattcaattcgacgccgtctattatgataaattcggtgcgggagagctggtgcgggactatctcaacattcccggcatctcttcttcagcatccttcctgttcaatgaagaccgtctgaaaatactgccgctccacccggaatcgggcgtgccgtttcagccggacagggaatgtgaagagctgttggccgagatgaaagacaaatacggtgtcgcccctgacagcatggttcaatttatgaacaacacaggtgaattgaacgtcgtctatacaagcagatattttcagcccgaaagtgagacattcggagatgagtatttatttatcggtccgagttttccgaagagaaaagggcgcgtcgacttcccgattgacgcattaaagaatgaaaaagtcatttatatctcaatgggaacggtgctcggggacacggaagcgtttttcaatctgtgcatagacgcgttctcagattttgaaggaaaagtagtcattgccgccggggaaaaagccgatctgtcgaaaatcaaacaggcgccggaaaactttatcatcgccccgtacgtgccgcagcttgaagtgctggagcaggccgacgtgtttgtcacgcatggcggaatgaacagtgtaaatgaaggcattcattatcaagtgccgctggtcgtcatcccgcacgataaagaccagccgatggttgcgcgccgcctgactgaattggatgcaggctatacagtgcaaaaagatgaagtaagcgctgaaaaggtaaagcttgccgcggaagaagtgctgcataacggaaaatacaaacaaggcattcaagccattaatgaaagctttaaagaatgtacggacatgaaggatgttctcgcccggatcgaccggtttattgaacaaaaacatgctcaataatacatggaaaaagcctgtttcctctgtcaaagggaaacaggctttttataatggcttttagatgatgtgatgttctgcatttgcaagtttcacaagagtcaaaagagattctgcctcacgtgcgtcgagtgtttttgccagacggtctttttcaaagatctgctggccgaagacattcactgacgcctggtcaaccgccgtgtgccagttcttttgtgaatgattctcagaaaaagagaaaacgaacacggtgaagaccgctataagcatcgccatgacccaaaatttttgccgatttcctgctgctgacataggccgcctcctaaacattttactggtattagatcatatatgagctgtttttaacagagtaaagaagtcattatttcatgtagtccaaatgaaacggagcacagccgaaagcccgccggtcaggccgatgagccaattcatattttgttcatattttattaaaagtttatccaagtctgtcctttacagtagatataaccacaaaatgctgctgaaaggagcctttaaaaaatgcatattcatatgatcaacaaaaaccagtttgagagtgacttggaggcggccggcttcagccgtcaggcagatgatattatcggcaaaatgaaagagtacgtaacggaatacgcggcttcatccgaacggttcctgattgaaattcaaaccgtcatgaacgaatacaaagccgtcgtctgcgcgatgttttcgactatggaaattgccgatgcaaataaagacgagaagcatgttgaatttgaagcctgcacagtattgtgtgaataaaagacattcatcaaacctccgcggctgcctgaacggcagtatactgactgtgtttcgagaagggaaaatattgaaacttctaaagcggccgttcgtataaaagagtaaatcagcttgtatatggaggttcgtgaaatgaacgataagaaaaaacaagcgtttgaacagcttttcagcactttagacgaaagacatgaaataaacggcgctgtattggcagcggaaaacggccgcatcttataccagggttcattcggcgctgcagaactgaaaacaaagaggatgctgaatgaccaatcggtctttgaattggcctcagtatcgaagccgtttacagctttaggcgttatcattttagagcagcaagggaagctgcgttatgacgatatgatagagcggtggcttcctgattttccttatccgggcattaccattcggcatttactccatcatacgtcaggattgccggactatatggagttgttcttaacacattgggaccgggacagaattgccgttaatcaagatgtgatcaatatgctcaagcagcataagccggatgcttatttcccgccgggcaaggagtggctttacagtaatacggggtatgtggtgttagcggttattatagaaattgtatcaggcatgagttttgctgaatttatgaaacaagccgtatttcatccgcttcgtatgcacgatacgcggatttataacagaaggctgagtaaagaaaacattccgaactatgcatatggctatgtgtatgatgttcattccggagaatatgtgctgccggatgaacttgaggaaactgattatgtcgtctttcttgacggcattcaaggtgacggaaccgttaactccgctattagagatttatatctgtttgatcaggctttttatacggaagaaatcatcggcaaagagtctaaagatcaagcgtttacaccgggctattggaatgaagaagagcaattcggatacggatttggctggatgattcaaaacagcccccaaaaagggaaggttatcagtcacgacggaggctggccgggctattcaactctgatgatccggtatattgaccagaataaaacattgatttatctcagcaatatggaacaatcgtatcaatttgaacaagctgtaattgccgcggctgtaaacatcttatttgatcagccatacgtgattccgaaacgtccggcagatcagaaaaaagcagatatcgatcctgcgatttacagcagatttaccggcaattactcatttcaggatgacacacatgcatcggtggcggtaaaagaaaaccgattgtatcttacaatagacgggcagactccattcgaattattcccaatgacggaaacccgttattttgtcagggcgctgccgcttgaaattgaatttgcaggtgataaagcacaaacagccccacattttgttttatatcaggacggcacagaagaaacggctgtgcggatagactgagtgacatgcaaaacaaaaccgccgtcctgagaagacggcggtaatagaaaagtcaaacccctttgatgacgcgaaattttcttttcggctctgacataaatatagaagaaaaaatcatagctccgagcattgtgatgtattccatataaagcgaaacctctgccaaaaccaaccccgcaatcattaaaacagcgcccaataccaccgcaaaaaccttcgttttcatgatgagttccccctattatctgataattgaattatactgcatctccattaatgtgtacattttgtgaacaatttcacctgatgaaaggcaataaagagagagttgaagaattaggagaaatgacaggccatctttttgttttactgaaaaaacgaaagggaaagtgaaaaatcaaaaaggcaaaggagttcttgaaatgaaagcgagactatttttattcagcatgtttctcctgatccccgttctggcgcttgccggatgcaacagccaatcttcaggaggaagcgaaaaagcgaaagacaaagaaacgcactctcacgaagacatgaatcactcaggttcatccgaggtgccgaaaggtttaaagaaggcagaaaatccgacttataaggtcggcagtgacgtcatgattttagcttctcatatgaaaggcatgaaaaatgcgcaaggaaccgtaaaaggtgcttatgatacaacggtttacagtgtatcttacactccggaaacgggaggaaagcgcgtcgaagatcataaatgggtcattcaggaagagctgaagggcgccggggataaaacgttaaaaccgggtgacaaggccgtgatcgaggcatcccatatgaaaggcatgaagggcgccgaagccgttattgattcagccaaaaagacaaccgtttatatggtcgactatacaccgactgacggcggccaaaaagtaaccaatcataaatgggtgacagaagacgagctcgctgccgcaaaataaaaagaccgcaaaagccgaaggaactcctttggcttttttgcggtctcacatttatgcggattttcttttcaaagcgggtctcgttaaagagaatacagctaacgcgacagcgataatgacaatcaaaccgccgcaccaggctgttgctgtgactgaaccggtttgtccgatcacgccgccgccgatggctgacccgagcgcgatgccgatctgcaaagcggacgtgttgaagctttgctgaatatcggaagactcaggcgcaattttgattaaatagctttgctgcgccggcgcaaggctccagctgagcaatccccagatcaccatcgcaggcaggaaaatgattaaagaaaccgttgtcagcggaagaataaacaggatcagagcgaaagaaacggtcacaagcatgatgcttttaaatgctcctaaacggtcatacagccagcctccgaacgggccgccgcataccgctgacagaccgaacaaaaagtagcatacactgacccaaacggaactcaaatgaagcgttctttccaaaaaaggcgcaaagtaggcatagagtgtgtaatgccccgccaatgtaaacaaggtgacaagatgtgcgctggcaattttggcggtcccgatcgtcttgatctgctcacgaaacggaatcattttttcggcaggtattttttcaaaaaagacgctgataatcagcatggaaacgagagataatacgccgattcccaagaacagaacgcgccatccgaaggcattgctgatgataataccgacaggcacgcctaaagcgattgcggagctgaaccccatgaaaatgatgccgatcgcccgcgctctgtattcaggcgccacgattttaggagcaatcgttaaagaaaggacgacaatcagccctgtgctcatggaagcgagaacccgtgacaccataagtacggcgaaattgggactgaaataagccaccagattacttaggaagaaaataaacagtgcgattaaataaagccgctttcgttcagcctttgccgtcactgccaaaagcagcgggccggataccgcgtaaccgagcgcaaacacgctgatcagctgccccgcgctgacgatggatatatctaagtcggaagcgatttgcggaagaataccgcccacaattaattcaactaatccgactgcgatggtagatgctgcaagcagaaatactttgaaattcatgtacagatactcctttttttattttttagaaaataaaaaatcctgattacaaaaagtgtacgggacaatttttgtaatcaggattttacggttcctggtagacaccctcaaaccatatcattgaggttatacaatgtatgcattattcggttgtgtccttttctgcaaaaaattctaccataatagtgagcgagattccatagaaaatttgaggaaatcctttcaatttcaatatcggcggctgtaacgtcattgatgaagcagggaaaaaaatttatgataaccgtaaggagtctatacagatcaaacattatacagccggaggaaaccgatgaataagtacgaaaaaatcgccaacgaaatgagaaagaggattaaaagcagtgtatatgacatagatcagccgatcccggatgaaaagacgctcgctgcggagttcgggtgcagccggatgacgatgaagcgggcgcttgatacacttgcggctgaaggaatgcttttcagaaaaagagggcacggcacgtttatcattcaatcagccatgcaggatgagcacgttcacgtagtcagcaacgaaattctcggcctgagcaatttgttaaaaggcaaagatatcaagagcaaggtcatccggtttgaagtgcagtttccgtctcaagatgtcgccgcacatttggccatcgatgaaaagactcccgtctattatgtagtgaggctcagaattgttgaaggcgaaccatacgttcttgaaaaaacgtacatgccggcgagccttatacccggcattaatgacgaggtgctcaaccattccatctacgatcatattacgcgggaactccagctcaaaatcgcaggctcacacagaaaaatcagagcgtgcaagtcggatgatatggatcagcaatatctcggctgccggccggatgacccgatacttgaagtcgagcatgtaggctttttggacaacggcactccctttgaatattcattttcccgccaccgtcatgacaagtttgtcgtgacctcagtcaatataaaacgttcataaaagcgccgaagagtgagagaaaaactcactctttttttgttgccgctgatttacatcttcgcttcttttatgttatattacccaatgatagaatcatcctacaaatttcagaggtgttttgatggagatatccaaaacaagcagactgtcgctcgtagaacaagtggtgacgcaaattgaatcgttaattcaatcggataaatggccggtcgggacgcgcattccccctgagctggatttaatgaagcaatttgatgtgagccgaaacacattgcgtgaggccattcgggcgctcgtacatgccggcctgcttcagacaaggcaggggagcggtacgtatgtcagctcatccagtgttctcggcgcggcattttaccgccatattaaaaaatcaaatttgcttgaaacattagaagtcagatacgcactcgaaagagaagctgcgcgattggcggcggaaaggcgtaatgacgaagacctgaaagcactgaaggcatgcttggatgaatgtgaagcggccttgcaaaatgaagatcgaaaacggtatgccgaggctgacattaaactgcacaaaaccattgtacaggcggcccataacaacatgctttctgatctttacgagcatatgacggaggcgctttgtgcgtcagtccataacctgttggaaatcacccctgctatacggatccacacccagcttgccgccgcgattatcggacagaaaccggatcaggccatggaggccgtcaaccaatacatcacagtatttaaagatacaatacacatggaggatgaacatgaaaattaaagacgaacatcaaattctgcaagcaaatcagcgtaaaaaactgatattgctggtcatcggagtcatattgataggagccaacctcagagcgcctctgacatcggtcgggccgctcgtttcctcaattcgggacagcctcggcatgaccaatgcggctgccggcaccattacgacagtgccgcttttggcctttgcatgtctgtcgccgtttgttcctttattgtcccggcgcttcgggaccgagattgtgttactgtcatcattaattgtcctgacagccggaactctgctgcgctccatcgccggaatcggcactctctttttcggaaccatcctgttgggattgtcgatcgccgtatgcaatgtcctgctgccgagtctcattaaacataagtttcccggaaatttaggcatcatgaccggcgtctactcggtttctatgaatctgtgcggcgcgattgcatccggcatcagcgtgccgatcgcctcttcagcggggttaggctggaaaggcgcgctcggctgctgggctatcctttctttcattgcgtttgtcatgtggattccgcaaatgcgaggacgcgaactgcccgtccgcacgactgggacaaacggagagaagaaaagcagtctgctgcggtctccgctagcttggaaggtgacgatgttcatggggctgcaatcccttattttttacaccgtcatcgcttggctgccggaaattcttcagcagaatggactcagctcaagtaaggcgggatggatgctttcattaatgcaattctcagtcctgccgattacttttatcgtgccgatcgctgccgctaaaatgaaaaatcagcgcgcactcgccggactgacagctttatttttccttatcggcattgccggcgttcttttcggaagcccggctctcactccgctatgggtcattttaatcggaattgcgggaggatgtgcgttcagcttggcgatgatgttcttcagcctgcggacccggcatgttcatgaagccgcggcgctttccggcatggctcagtcattcggatacctgcttgccgcgttcgggccgctcgtattcggtttgctgcatgacatcacgcacggctggacggttccgttattcatgctgatcgcagtctccgtactgatcttcattttcggagtcggagcgggaaaagcggaacagatcaaaacagcataaaaaaacaaagggcccgcttaagggtcctttgtttttttatttaaaaagctgtctcaggccgtcacgctgtcagttttaagccgatgacaccgatgaggataagccccagagacaccaattgtgacagattgaatttttctttaaaccaaagtatgcccacggccgaaacgccgatgcttcccatgccggtccaagcggcatacgcgacacctgtgggaagaacctgcatcgctccggaaaggcaaaagaatgaaagcataaagcctgttaccatgacaatcagcggccacttttttttaaaaccgtcaatatgtttcatggcaacggccgctacaacttcctccgctccggcaataaataacagcagccatgccattaatgttcaccccttgtttcagtttctttcgtaaataccttcattcctaaaatgccggacaacagcaaagccaaaaagaatatttgcccgattgaaaacgattcgcctaaaatgacgcccgttacatatgtgccgacggtgcctattccgacaaaaacggtatatgcggcagccatcggaatttttttataagagcggatcagcatcagaaagctgacggcaatcagaaggaaaataccaatccaatcaaagagcgaatccgcatgcttcagggcggacgcccaaactacttctaacagtccggctatcaatacaagcagccaatacatgatacagtcacctcagttatgaatgaatgtcagtcatttttacggcggtcaaaaatgatcggtctccgccaatcatttctgcaagcttcttttgagaaagctgaatatttcttttttatatacttcgagatcgacatcctgttcacagccgatataaaaccgttcagccgcgttctcgacaacgttgataatcgttctggccgtccatctgacatgaatgccgctgtggacctcaccctgttcaatggccgtattgatcacgccttccagccaggaataataaggctgataaatggcttcccatttctccatcgaatgatcgatggcaagaccggaataacagagaacgataatatctttatgaagccgggtgatgtgaaatgtctcatctaccaaaatgtccagcaacgtccaaaaatcttcagaaccgtccgttttcccttttattctgtccagcgtagtgtcgagcaggttttctgcaatcgcggatatcagtgcgtttttagaagaaaaatataagtaaaacgtaccttgggccgttccggcttttttgacgatttctgaaatggatgctttgtctaatcctttttcagaaatgacttcaatcgcggcttgcaggatcttttcgtattttcccgagctttgttttgccaatagaggggttcctccttttatgaatgactgtcattcattttatcgcatgttctcttttttgtcatcccttaaaataaaaataccggaaagaagagcatacttctttccggcattcgtcatttatcactgtcgatcatagccttcggcagacccgtatattttgcccagtaataaataccgagcgaaccgatggcgatcagaatcaggtcaagcggattgctgataatgcccaatccgtggccgaacgagccgagataggagaaaatcagcatcatgacataaaagccgacgatccaccatgctgatttcagctgctgccgtatgctgacatcatctttgggagcatatttactgaaacagagatagatcagaaacatgacaatttgagaaccgagaagccaggatacggtgcgccatccggaccaatatacaatataagaggtaaaaataaacgacagcggcccgatgatgctcatcccttttaaataaaacggtctgttaatattcttcgcgttgactctcagcgccgcagaagaaatcggcgcaatcgcataagacagaatcaatgcgacggagcatacgttgacaagagcgttccaagaagggaacggaagcgtccaaaaaacagccagaccgaacgaaagccaaagggaggcgcgcggtgtcccggtttctttattgactttagaaaaaatgctgaataatgttccgtttctggcccaggcatagacgagacgtgaagtcgtattcataaagatatttccgttaccgcccggtgataaaatcgcatctaaaatgaccaatgtcgccagccaccccaaaccgagcaaaacggcgatatctttgaacggaagggagaattcagtcccgatagccggccatccgtgcttcagggtatccgccgggatcgccccgataaaagtgagctgcagcacggtgtaaataatagtagaaacgataatacagacaatcaatgcgatcggaatgttccgcttcggattctgcacttcactcgcgacagccacaatcggatgcagcccaaggtatgcaaacatgacgccgcctgtggaaatcgcggcctgaattccggtgaagccaaaaggcgtgaatccgtgaacggtcatattgcccgggtgaaaatgaaaaatcagtaccacaattaccgtaatcggtacgacatatttaaaaatcgaaataatgaagtttgctttcgcaaaggttttgacactccagtaattgaggaggaagaacaggcagagcagcgcaaattgcaatatccacccggcaattgtcggagaatcggagccttttacggtcaaaccgggaaaccaatacgccacgtattggcggactgccgtgacttctatagaaataaggctcgtgtatgccacaatggtgacaaaggaaattaaatatccgacgaggtgtccgtgtgaatatacgggataccggataattcccccggtccgcggcagcgcggcgcccagttccgcataaaccaagccgatcaataagatgattcccccgccgatcagccaggaaaaaatgcctgatgggcccgctttagaggcgacgttactgacggcaaacagccatgccgaaccgaatatggctcccatgccgattaaaataagatcaaaaagtgacatagttttctggaagtttccttgcttagacattcgctgcctccttaaaaaagacattgttctctttacataattcccattatcattcaaacatacccagccggccggctggaaaattaggacaactttcgaaacgaagtatgtacagcaatgtgctcacattataataacggccgtatggcaagatctcccggcttatattccccgttttaaacacattcaaacctcatattcagaaaaacaaaaaacgcccgaaacaggcgttttttgttacaagttcatatctttcagtccggggctgtgctcattcggaagttcaggaagttccggcacggggaaacctttaggaggctcggacacacttaattcgccgccgtttcggctcggcgtcgttccctgcagaatttctccgatccgtgtcggatccagtctgaaattaaattgggtattatgataacccatctcaacgaatttccggcattccgggtatttttcaatatcataattcggcacgggaaataatttgccccattcgacacccagtgtttccaacgcttttgtaaatgcattttgatgggcgttgtcacggacgatcagaaaaccgagtgtttctctgaacgtctgatttgaactcatttcataaatgcgtgtcttttgcagcacgccggttgattccagcacgacattgtccaataaatcggaaatcagattcccgtggttgtatacccaagacccgttccatggattgccgccggcgtctacaggaagagaactttgcgctccgatgataaaatggtgcggattggcgtgtttaactgcttcgtcaagcggcgcctgatctgctgcctgatttccggggccctcagcgccgctttcgtcgagcagcgcattaatcgtatgctggacaagctcaacgtgtgcgatctcttctaaaaatacaccgcgaagcaggtcacggaactgtttttcttttcctctgaaattagagctttggaaaaagtattgcatcatcgtccgcatttctccgtagtgcccgcctaaaatttcctgaagcaccttggccgcggccgggtccggcttgtccggtttaatgatattgatcagctcttctttgtaataatacataaacagcgccccctgaaagaagttttcggttcttctgttagtgtctttgcaaagtcagtttttatgtatcggcatcaaaaaaaggacgggaagcgtgtccgtccttttgtgttaagcctcaaccgccccgcgaagtttcgtgttgacaagcccgttccatccttgatccatcgtactgtgaatctcggagcttttccgattgactttattgatgacggcttccggctctttccatccgccgtgaatgagagtgaattccgtatctccgctttccgtttcctttaagacaaaagaaacgatccagccttccgtatcccacgaaaaagaaaggcggtacggcgcttcaatatccagcagcttgcacggagacggaccgaacggagattccagctgaaactcactgtcttcttgaggtgtgaaatcattcggcataaaccagagagacaggccgtccgcagtggagaccgtatcccagacaacttgtatcggcgccttgaaaacggcggtatgaataatgtccggtaatggctgattgctgctgttgttgtttttgttatctttgttttgtttatcagacatgatgcgtaaccactctttcgctgtttttacttttgatcatactacacggggcaggacatttgaaaacaaatcaaacttattttatgcttttccaaagccattcaattcattttaaggagacgtagtgatgacagatcaatttaaagcgttagtagtcgatcaacgtgaagaccggttttcagtcagcgtacgggagctggcggttcaggaccttcccgagggtgaagtgctgattaaggtttgctactcaggggtgaattataaagacagcttggctgccattcctgacggcaagatcgtaacgtcgtatcctttcgtgccgggaattgatttagcaggaattgtcgtttcctcagatgacgcccgtttcaaagagggggatagggtcattgcgacaagctacggcataggtgtttcccgctttggcggttatagcgggatggcccgcattccggcagattggatcgtgccgctgcctgaaggtctgacacttaaagaagccatgacgatcggaaccgccggcttcactgccgcattgtccgtccagcgtcttgaagaaaaccatgccgctcctgaaaaagggaaggtgctggtgacaggagcgacaggcggcgtcggaagctttgctgtctccattctttcaaccttaggttacgaggtcgaggccagtacgggaaaagaagacgaaagcggctatttgaagagcctcggagcaaagacggtcattcatcgtgacgaagtgtataacggcacgttaaaaccaatgcaaaaacaaaaatgggcagcggccgtcgatccggtcggaggtgagccgcttgcttcagttctcagccagattcagtacggcggatcagttgctgtgagcggactgacagcgggaacgaaactcccggctacagtctttccgtttatattgcgcggcgtcagtctcttgggaatcgattccgtattctgtccgatggagacaagaaagaaaacatggcagcgtttagctgatgacttcaagcctgcagatctggaggcctttattcaaaaggaaattacacttgaagagctgccggatacgcttcctgctcttttaaaaggagaagcgagaggaagaacgatcgttacaataaacgaagaataaatcaaaaacccccaactgctgattgggggttttcgagatttaatcaattatttatcaaaaagagattaactattgatcatatagtgaaaatgagttgattaaaaacataaattgattacatgtaggtaatataaagataagttataaaattttctgaaatatttattgactgaaagcgcttttaaaattatgataataacataaatgccaataatatcattataacttcactataaagtaactataaaataacaatttgacgagaggggagagcggataatcactataaatgataacgctttcagattattttcttcttatataactgttttggacggtcagaacttgtatgcagacgttataggtgcaaatattgataactgaatattccgatattatctctatgtaaaaactaggaggatttgaagatgaataaaaatagcagccagcattcatttttgagaaccatcattttagtatcgacgttcgggggtctacttttcggctacgatacaggtgtaattaatggggcgctgccgtttatggcggaagctgaccagcttaatcttaccgctttgactgaagggatggtggcgagctccctgctcttgggggccgcgatcggagcagttttcggagggagattgtcggactataacggcagacgtaaaaatatccttatccttgccgttttgttctttgcagcgacgcttggatgtacactggcgcctaacgtatctgttatggtcatctcccgttttctgctggggcttgccgtcgggggagcatccgtaaccgttccggcgtatttggctgaaatgtcgccggcggaaagccgagggagaatggttactcaaaatgaattgatgattgtaacaggccagctgcttgccttcacgtgtaatgctatcatcggcaatgtgcttggtgatacctctcacgcctggcgctatatgctcgttatcgcagcccttccggcggtattcttgtttttcggtatgctgaaagttcctgaaagtccgcgctggctggtttctaaaggaagaaaagaagatgctctgcacgttctccggcgaataaggagtgaagagaaagcgaagtctgagctcgctgagattgaatctgcctttcataaggaagctgagatggagcaggccgcctttaaggatcttgccgttccgtgggtgcgccgcattgtgtttatcgggatcggaattgcggtagtgcagcagctcaccggcgtgaattcaattatgtattatggaactcaaattttaaaagatgccggtttcgagacaaaagccgcattaatcggcaatatcgctaacggtgtgatttcggtgctcgcgacttttgtaggaatatggcttctcggcaaagtcggccgccgcccgatgctgatgacggggctgatcggaacgactgcggtgctgcttttgatcggagttctgtctgtcgtgctgaaaggatcgcctgctcttccttatgtggttctttcattaacagtcactttccttgcgtttcagcagggggctgtctctccggtgacctggctgatgctgtcggagatattcccgcttcgattgcggggacttggtatgggggtcactgtcttctgcctctggatcgtgaacttccttgttggtttcacttttccggtcctgctcgcaaacatcggattgtctgcaaccttcttcatttttgtcctgttagggatagcgtccgttatatttgtgaaaaggttccttccggaaacgaaaggtctgtcgctcgaacagcttgaacaaaacttccgtacttatgaaaaaacagatcgtaatagcgcagaagccaaggtgagcgggtaatctggatagacgcggggttcctaggaatcctgcttttttatttattatatagaagggaataataagtgagaaaaaagtttcgtaaaagtgttgacctaatttaaagtgcatggtatattattaaacgtcgctgatgaacaaagcgataacgacaaatgagaaaatgatcttttgaaaaaagactttacaaattctcaaaagcgtgtataataaatgaggttgagaaaaagactttgaaaagaaataaaaaaacacttgacatcataactgattggtagtatgatagttaagtcgcctgataagcgcccgtagctcaattggatagagcgtttgactacggatcaaaaggttaggggttcgactcctctcgggcgcgccaatttaaacgcgggtgtagtttagtggtaaaacctcagccttccaagctgatgtcgtgagttcgattctcatcacccgctccattataatgatctttgaaaactaaacaagacaaaacgtacctgttaattcaaagttttaaataaatcgcacagcgatgtgcgtagtcagtcaaactactttatcggagagtttgatcctggctcaggacgaacgctggcggcgtgcctaatacatgcaagtcgagcggacagatgggagcttgctccctgatgttagcggcggacgggtgagtaacacgtgggtaacctgcctgtaagactgggataactccgggaaaccggggctaataccggatggttgtctgaaccgcatggttcagac

SEQ ID NO: 18 - DNA, 17217 bp, Bacillus methylotrophicus
tctgaaccatgcggttcagacaaccatccggtattagccccggtttcccggagttatcccagtcttacaggcaggttacccacgtgttactcacccgtccgccgctaacatcagggagcaagctcccatctgtccgctcgacttgcatgtattaggcacgccgccagcgttcgtcctgagccaggatcaaactctccgataaagtagtttgactgactacgcacatcgctgtgcgatttatttaaaactttgaattaacaggtacgttttgtcttgtttagttttcaaagaactttgtccatcgctcttgaagcgacttaattattgtaacatatcagtgtcgatgtcgtcaataactttttataatttcttttttaagaattcgtttcgtcatcagcgacgtatattagaataccacccttgatccaacatgtcaacaataatcgataaattaaatgatgaagcgtttaatgactatcaaagccgcgatgccgggaatccccagaatcccgctgatgcccgttgtaatcaggttaacagggatatgaataccgagactgcctccgaacaagttcacacccaccagcagaatcgcaccggcaataaacttaatcgcagtcacaccaatccatcttaacggttttgaagataccccccataaaaaaagcaaagcaaccagaccgacaatcaaaccgataatgaaaaaaggctccatgaatcttccccctcgcttgtttagtacaagcttatgagaagatcccggagaatagacctcttacttccatctgctcattttcaaattccgctgcttcgcttctttcaaataaaaaaagtacttagattcagcgactttcagctcaaacaatacctcagcggagggctcgagacttttctcgaccagactcttctgtctgttccattcttctttttgtttaaagagctgttctatcagcttctcatcaaactcttttcttaatgtatttctgcgaagaaaacccatgccttgccttttcctcccttacaattcacgtcttccttcaagagcttttgaaagagtgacctcatcagcatattccaaatcaccgccgacgggcagaccgtgggcaatacgggagagcttgatgcctgagggctttaacagccttgatatatacatcgctgttgcttccccttcaatattagggttggttgcgagaataacttctgtcacttgatcatcctgaagacgtttcagcagctccggaatcttaatatcctccgggccgatgccgtccattggtgaaatcgcgccgtgaagaacatgatactggccgttatattccttcattttctccattgcgatcacatccttagggtcctgcacgacacaaataacagacttatcccttcttgtgtcctcacatatataacaagggtcctgatctgttatatgtccgcaaatcgagcaatatgtcagattccgcttcgcattgacaagcgccttagcaaaatccaatactgtgtcttctttcatacctagaacaaaaaaagccagacgaaccgctgttttcggtccgatccctggcaatttcataaagctgtcaatcagctttgatattggttcaggatactgcatgtttatttatccccctagaataaacccggtatgttcattccttttgtaaattgtcccattgtctcattcgtcatgtcatccacttttttgagggcgtcgtttgtcgcagcaagaaccaggtcctgaagcatttcgatatcttccggatcaacgacttcttctttaatggcaatgtctacaacttctttttggccgttgacttttacagtcaccataccgccgcccgctgtaccttcaagcactttttcagcaagctcctcctgagccttcgccatatccttttgcattttttgcatttgtttcatcattttttgcatgtttcccattccgccacgcatattcaatcactctctttcatcttattagtcttttatttcgattaaatccgctccgacaagttttttcgcctctgcaatcagcggatcttcttcagccggttcgtttgatccttcactttcctgctggtgatcatttaaaaattcttctcttattttaccccattgtgcttccggaacgccaatcaaatccattcttttcccgagcattgattcgagaatctgttcaagattcgtacggactccgttattgtcttctgcaaccattttacaatggatttcgtatttaaatttaagtacaaatgccttttgagcagcagccaccggttcactgtcattcaaaagagccgcatgagacaccttattctgctgtttcaggtgtgccagcagcttgccccagctgcttttaagctgttcaagttcaggtcttgtggcttccttcaatatctcatgaattcttccgaccggagctttgtaatggctttttccgcctttttgaggacgcggagcttctttcggagcgctttccatctgaaccttcacaccggaggttttcagcctttctacttcctgctcaagctgctgaatcttattcatcagcatgccgacctcagggatgtctccggcggattgctgtgccgtctggcatattttcacgacagccacttcaaaaaagattcttgggtggttcgtccacttcatttcctgatggcttttattcaggatatcaatcatctcatataaagcgggggccggtatgtcaccgctcagattccgaaacgtttcatcgaccttcaccttctccaggactccttctaaaccgggagcggcctggtacaagagcatatccctaaaatagaaaatcatatcttcaatcagtttggccgcatctttcccttgctggagcaattcattcagtgtttccaatgcctcggaaacctgtttgcggtgaagagcagatgccagttttccaatatagtgctgagaaacggctccggtaatgagcaatgcatcatccaccgacagctcctcgccgctgaatgatacggcttgatcgagcaggctcagcgcgtccctcattcctccgtccgcagcactcgctatgatatcaagggctccttcttccaccttcagctgctctgcatcgacgattgtcttcattcgtccgacaattgctttggatgtaatccttttgaagtcaaaacgctgacatctggagataatggttaaaggaatcttatgaggctcagtcgtagctaatatgaaaatgcaatgtgccggcggttcttccagcgttttcagaagcgcattgaatgcgccgatagagagcatatgcacctcatctataatatatactttgtaggtgacggccgacggggcgaattttactttgtcacggatgtcgcggatttcgtctacgccgttattcgacgccgcatctatttcaatcacatctgatatagagccgtttgtgatccccttgcacgccgcacattcattgcacggttcttctacgggggcgtgctcacagttgactgctttcgcaaatattttagctgcactggtttttcccgttccccgcggtccagaaaacagatatgcatgagaaaatttcttttgcaaaagggcattttgcagcgttttcgtaatgtgttcctgtccgaccacatcttcaaactgctgaggcctaaatactcgatataaagcttggtaacccacaggatgcgccctcctctgttattcatcatgtttattatacatgaacgtgcttttaacgccaaaacccgtttttcatatacgaaaaaactcacctgccataaacaggtgagtctgaaatttgatgattgatttaccgtgcaccttctgtcgattcgctaccctaagcgttacttaagcagttagctcagcccaggcaaccctgcggcacatgagaggtttcacttaatgctgcttccttccggacctgacatggttcatgaattcccattgcgcaggacccagacgtcaacgccacttacttaaggcagaccttacagtaaacgaacctcgagaagggattcggccccgctagagcggattgcgggtacagggcaccgctacctccccgcttagcacggcaaaataaatatcaaatttttatatgcgcaccattcatgatgcacacataagtatatctgcttcaggcagaaaatgcaaccgtactactcagacaactttttcctcatgtctttcttttgctggcgcagctttctgaaaaaagcgctgagcatttctccgcactcttctccgagcacgccgctcaccacttccgcttggtggttgaaccgctcttcctgcaagaggttcatcagcgttcctgtacagccccccttgggatcaaatgcgccgaatacgaccttatcgactctcgaaagcacgacggctcccgcgcacatcggacacggctccaaagtgacataaagaacggcatcctcaagtctccatgtccccagcctacggcacgcttcgtctatcgccagcatttcggcgtgggcaagcgacctctgttcagtctcccgcagattatgcgcccgcgccacgatctcatcgtgcagaacaagaactgctccgatcggcacttcacctttcgcttcggctttcttcgcttcttttatggcttctctcatataatattcatcattcataggttcgagctctcttcttaagttttttcatgtctcataaaggttaaaataggaataccccagcagaaaggagttgccggtattgtctgaacctaacaacacagcccttctgattgtcgatatgatcaacaattttcaatttgatatgggcgaacgtcttgctgaaaaaaccaaacaaattgtcccccgtattttatcattaaagaagcatgcaaaacaaagcaactggccgattatttatattaatgatcattacgggctctggaaggctgatattgatgccatcagggaggaatgcagcaacgacagaagcgcccccattataaaagaaatttcgcctcagccggatgattattttctcattaaaccgaagcattccgctttttacgaaacagcgcttcacacccttctgaccgaattacaagtgaaccgattagtcatcacggggattgccgggaacatttgtgtgctgttcacggccaacgacgcctatatgagagaatacagcattgcaattccgaaagactgcaccgcttccaataacgacgaagacaatgatttcgctttgaccatgatggagaatgttctcttcgcagaaataaccacggaaaaacaaattaccgccgaaaaataaacatgatcagcctccttttttcatatatttgatagcggatatgaaaggaggcgtttttcattcagatctatatagtgaaacggggcgacacgctttccgcaattgcggcgcgctaccggactgccgcaaatgtcattgcggaagcaaataaactgcctaatccaaatacattggttgtcggacaaacccttgtcatcccgattgagggtcaatattacgaagtgaaacaaggtgatactctcgcggcaatcgccggccgttttcatatatcggccgcggagcttgcgagggttaacggaattcagcccggcaccacattgagagtcggaaccagcctttacattccgcagcaggcgaataagcccgatatcgaatcaaacgcatatatagaaccgcggggaacgagcgtaagcgctaatctgcagcaggcggcaagggaggcctctccttatttaacataccttggcgcattcagttttcaagtgcagcggaacgggactttaaaggaaccgcctctgaccaatttaaaaagtatcagtgacaggcacaacaccacactgatgatgatcatcaccaaccttgaaaatgacgcattcagcgatgaactcgggcggctcatcttgaatgacaatacagtgaaaacaaaactctttcaggaaatcgtctccacggctaaaaagtacggctttcgcgatattcactttgatttcgaatatttacgtccacaggacagagaagcctacaatcgttttttacgtgaagcgaggacgatttttcatcgggaaggctggaagatttcaacggcgcttgctccgaaaacgagcgcgactcaggccggcaaatggtacgaagcacatgactatagggcacatggagaaatcgtcgattttgtcgtaatcatgacatatgagtgggggtacagcggaggcccggctcaggccgtatcacctatcggccctgtaagaaatgtcattgagtacgcgctgacggaaatgccttcttcaaaaatcgttatgggccagaacatgtacggctacgattggacactgccttttaaacagggaacgacagccaaagccgtcagtcctcagcaggcaatcgctctggcagcacgccataaagtcgacattcaatatgacgaaaccgcccaggctccattcttccgatacacggatgaaaatcagagacggcatgaagtatggtttgaagacgcacgatccattcaagcgaaattcaatttaattaaagaacttcatttaagaggaatcagctattggaaactcggcctttctttcccgcaaaactggcttttgctcaacgatcaatttcatattgtaaaagagacgtttcgttaattggaagcgtcttttttcatgggcttttctgagagtgtgatacaatataaaggccggcagctgacggatgtttgcagaattaaggaggattttcaatgaacagagccccttttatcgcggtagaaggtcctatcggggcaggaaaaacgacactcgctacgatgctttctgaagagctcggttttcctatgattaatgagattgtggaagacaacccttatctcgataagttttatgacaatatcgaggagtggagtttccagcttgaaatgttttttctatgtcacaggtataaacagcttgaagacaccgatcgagattatttaaaacaaggacagcccgttttgtccgattatcatatttataaaaatgttattttcgcagagcgtacattgcacggccaaaagcttgagaaatataagcagatttatcatctgctcactcacgacctgccgaaaccgaacatcattgtatacataaaggcaagcctgccgacattgcttcaacgcattgaaaaacgcgggcgcccgtttgagaaaaatatcgagcatcaatatctggaacgtctcattgcagattacgacacagccatcagacagcttcaggaagaagatccggatatatctgtactgaccattgacggtgatactgaagactttgttttgaataagacagactatgaaagaattgcccgtcaggtaaaggagcttattaaatgaaagacattcatattccaaacaacgccattatcacagtagcgggaacggtaggagtcggaaaatcgactttgaccaaagctttagcaaaacggctcgggtttcatacctcacttgaggaagtggatgaaaacccttatttagagaagttttatcacgattttgaacgctggagcttccatttgcaaatttattttctggctgagcggttcaaagagcagaaaaacatgtttgaatcaggcggcggattcgtgcaggaccgttcgatttatgaagatacaggcatattcgcaaaaatgcatgccgataaaggaaccatgtcgctgacagattacacaacatacacaagtctatttgaggcgatggtcatgacgccgtacttcccgcatcctgatgttttgatctatttagaaggcgaccttgaaaacattataaaccggattgaaaagcgaggccgcgagatggagctgcagacaaaccgctcctattgggaagagatgtatacacggtacgaagactggatcagcggttttaacgcctgccctgtgctaaaagtgcgcattgaagattatgaccttgaagctgatgaacagtcactggaacctttgatcgaaaaaatcagccgcgtgatcaacgaaaacagaaataaataaaaatagcaaagcgattttccccgaacagagaaaatcgctttttttgcatataaaaaatccgctgcatcacatgcagcggacaaaacaatctccaatatatgctcgagtttcattaggtttaaaatcaatatggcggaggaagagggattcgaacccccgcgggctttgacacccctgtcggttttcaagaccgatcccttcagccagacttgggtattcctccgtatcgacatttaataatataccacatgacctaaatttcagtcaagcgctttttcatattttttatttcatttcttaaacagcttgtccgtcagctttactatcatacaaaagtcttgcgtccaattcaacctcagtatgccatacgggcaggaaaacacagtaaaaatcaagaatagattcaaacagatacctgctcataaaggtggagaacataatgaaaatcatcattgcaccggattctttcaaagaaagcatgacatcaaaagaagccgctgacagcatagaaaaaggattcaaagcggtcttccctgacgcggaatatttcaagatacctgcggccgacggcggagaaggaaccgttcaggctttgacggatgccactggcggaagcatcatcaaaaaaactgtgaccggtccgctgggaacgccggtaaacgccgcatatggacttctgggagacggacgcacggcagtcattgaaatggcggaagcatcgggacttcatctcgttccccgccatctcagagatccgttgaacacaacgacaagaggaacgggtgaactgatagcagatgcagcttcccgcggggcgggtgagatcatcatcgggcttggcgggagcgcaaccaatgacggcggaacaggaatggcgagcgcgctcggtgtgcgtttcttaaatgaggaaggtcaggagatacctgacggcggaggcgctctgcacaccctagcttctattgatataagcggtctctctcctgatctgaaacatatccgtatccgtgccgcatgtgatgtcgaaaattctctgaccggtgaaaacggcgcttcatatgtcttcggcccgcaaaaaggggcatccgagaagactaaagttgtattggatcgcaacttacgccatttcgctgacgtattgagacgtcagcacaatatcgaagcggataccgtaaaaggcgcgggcgccgcagggggactcggcgccggactgatcgctttcttacaggcagaacttcaaagcgggattgacgttgtattagatacactgtccttctcagatcagataagaggcgctgaccttgtcattaccggagaggggcagatagacggacaaacgctattcggcaaaacccccgccgggatcgccgcacgcgcatctgctcaagaaattcccgttatcgcattggcgggctccttaggcaaaaatttcgagcatgtttacagcgcaggaataacggctgtgttttctatcgtgcccggcgctgtaagtcttgaagacgccttagcatccggccgttttaaccttgaaagcactgcccggaatgccgccgctctataccgggcagcaaaaaaggcgcgcctctagggcgcaccttttacggtttgatgacttctttatttcccatataaggacgaagcactttcggaatgatgacacttccgtcttcctgctgatagttttctaagatggcagctactgttctgccgactgcaagacctgaaccgtttaatgtatgcacatgctccggcttgcctttcgcttcgcgtctgaatcgaatgtttgcgcgtctcgcctggaaggcctcaaagttactgcaagaagaaatttcacggtatgtgtcttggcttggaatccatacctcaatatcgtactttttcgcggctgtaaagccgagatcaccggtacacatgctcatgacacgatacggcagttcgagcagctgaagcacccgctcagcttgattcgtcagtttttcaagctcctcataagaatcttccggcttcacgaatttcacaagctcaaccttgttgaactgatgctggcggatcaaaccgcgtgtatcacggccggcagatcccgcttctgaacggaagcaagcgctgaatgcggcataattgatcggcaggttctcaccggataagatttcatcgcggtgcatatttgtaatcggcacttccgccgtcggaattaagaaataatcctcttctctgattttaaaagcatcctcttcaaatttaggaagctgtcccgtacctgtcatgctcgtacggtttaccatataaggaggaatgacttccgtgtaatcatattcatcaacgtgaagatccagcataaagttgtagagcgcgcgttcgaggcgggcgcctaatcctttataaaacacaaaccggctgcctgttacttttgaagcgcgttcgaaatcaagaatgtttaaatggtctgcgatatcccaatgcggtttcggctcatatgaaaatgccggcgcctctccccacttgcgaatttcaatgttatcatcttccgtttccccgacgggcactgaatcgtgcgggatgttcggaatagacagaaggatggtttcgagcgtcgtttcgacagtacgaagctcttcatcaagcttcttaatttcttcgcccacttcgcgcatctctttaataatatgatcagcgtcttttttctcccgtttcaaaacggcgacctgctgagatacttcattgcgttttcccttcagttcttctactttaccgataagctctcttctcttttcgtccagctcttcaaacttgtcaaagtcagataagtcttcgccttttggaatgagcttcgcttttacctcttgaaaattggctctcagcaccttcgtatcaatcatgcctaacaactcctatctgtttttatcgaaaataaaaaagagccctcatcccctaaaagggacgagagctctcgcgttgccaccctgattgaaaacaagctcacacttgcttcccgctttaacacataacggttttcccgtaaatgcctactagttttcagcatttcgctcaaggacggattcggacagcatctttcaccgattcgcaccacccatcggctctctttgaaagagaggctccctactgcttcctgtcaacgcttttcgatctttatttgtgtttataatgtactataagtatcagcggttttcaactgttttatacagctgtttcctgcttatgcttttccgccatcttcacaaacagctctgtcacccggtgatcatccgtcagttcaggatggaacgagcagccgaggaaattcccctgctttgcagccacgatgcgtccgttatgctcacaaagcacttcaacatcttctccggcttctaaaatatgcggtgcgcgaataaatacacccgtaaacagctcatcaaggcctttaatcgtcagatcagcttcaaagctgtcaacctgacggccaaaggaattacgctcgacgacaacgttcaacagccctagatgagcgttatccgttcccgctatctctttggctaaaataatcagaccggcgcatgtgccgaacatcggcttgccttgggcggcaaactcgcgaagcggctccataaaatgatacgtatccattaaacgccgcatcgtcgtgctttccccgcccggcaggattaaaccgtcgatgtcattcagctgttcaggacgcttaatgacgacaccttttgaaccacatgcttcaattgaacgaatatgttctcttactgctccttgaagtccaagtacaccaattgttaacatgcttccagctctcctatggttttaccagccgcgttcttgcatacgctgttccggcaatagatttgagatttcgatgcctttcattgctgtgcctaattctttagaaagctcagcgatcagtttgtagtctgtgtaatgagtcgttgcttcaacaattgctttggcaaatttagcagggttgtctgatttgaaaatacctgaaccgacaaatacgccgtcagcgccaagctgcatcatcaatgccgcgtcagcaggcgtcgctactccgccggcagcaaagttcactacaggcagtttgccgtcacgcttgatttgaagaagcagttcataaggagcgccgaggtttttagcttcagtcatcagctcatcatcgctcatcgcaacaactttgcgcacttgcgcgtttacttttctcatatggcggacagcttccacaatgtttcctgttcccggttcgccttttgtacgaagcatggaagctccttcggcgatacggcgcgttgcttcgccgagatcacggcagccgcatacgaacgggactgtatattcgtttttatttaaatgaaattcttcgtcagccggagtcagaacttcactttcatcgatgtaatctactcccattgcttcaaggacacgcgcttcaacgatatgtccgatacgcgcttttgccattacgggaatggatacagcattcattacttcttcaacgattgtcggatcagccatgcgggcaacaccgccggcagcgcgaatatcagccggaacgcgttctaacgccattacggcaacagctcccgcctcttccgcaatcttcgcttgttcagcatttacaacgtccatgatgacgccgcctttttgcatttctgccatgccgcgttttacacgatcagtacctgtttgagccattatttggtccccctagtcaatgtatagttagataatttctatctcttattgtatcccagaaatacaatatttcatatgggtattcttattttacagcgagatgaataagatagatatcatttttttactaataatttggttttttcagtatattaagcaaaagagccctaactttcatcagagctctttcttatttcttaaaaccagcctgttaccgtgtcaacggcgctgttccagataccggagaagaatccgccgatgccgcgcatcatctgaacaaaccagtttgctttatctacatcatttttcgttacaagattcacgctgaactctttggatttgaggaagccatagtctttgtcactgcctttgtatgtaactgtcagcgttccgactttcgttccctttttcacaggagccgtgatttcttttttatctaaagtcacttcggctttatagttcttttcatccccgcttttcacaggaatagaaagcgccttgtcagtaacaatatcgacttgcttgtctttccctttttcaacgtcaatcgttttgtgcccttttacttgagagccttcagggtaaagatctttcattgagaaattgctgttaaatgcgtaatcgagcatttttttcgtttcatcaaaacgtccggtatgcaggttgccttttgcgtctaatacaacagtgatgacccgcattccgttccgctgtgctgtgcttgtaaaacaagatcccgcagaatcagtagaacccgtttttaagccgtcaacgccagggtattcagaaacaagaccttttaacatgaagttccagttcggcatgtccatttcatcatcagtgccggctctgaatttcgtcttagcgatgcttgttgttttgagaacttccggataatcagtgatcaggcggtctgcaagaagcgccatgtctttagcagaaacttcactttcttctttaacgccttctccttgcggctgcttgccgtgaaggtcttcattcacaagccctgtggcatttttaaagtcatagtttgtcatgcctaattctttggctttcgcattcatttcagcgacaaatttcgtttcagttccggcaagaatttcggcaactgcaatcgcggctccgttagcagagtaaatcgccatagcctgatacagttctttaaccgtgtatttgccgtcttttcgaagggggacgtttgataaactgttgtcttgagaaatttcatagacataatcatcaggagtatacgtttgatcccatttcacttttccttctttaatggcttccagaagcagatattcagtcatcatttttgtcatgctggcaatcggcagtcttttgtctgcatttttactgtataaaatttttcccgatgaagcctcaatcattatcgcagctgatgcgttgacatcaatcgggtcattgccggctgcctccgctttagacattggaacaaagcaagttgcggccagtgccagtaccactaatgacaccaacagctgtttccatttcgtgatgttcaatcttacgacctccgtcattcattttaaatctataattaagccgttaaggacatattcaaattcaaaacacaacagtataaattttatcacactcgatataaaaaaaatagacagagtcagcgaccctgtcaaatgttttttatttgtaacaattatgagattgtatagtttggtgattctttcgtaatttggacatcatgcggatgactttcgcgaagtccggcacctgtcatacggatgaattgagcctcttctcttaaagcgcgcaagtcttttgaaccgcaatatcccatacctgaacgaagaccgccgacaagctgatacactgtttcttctacaggacctttgtacggagtccgtccttcgataccttcagggacgaatttcttattttcttcttggaaatatcggtctttactgcctttttccatggcagcgacagaacccataccgcgatacactttaaatcttctgccttgatagatttcagtctctcccgggctttctgaagtaccggcaagcaggcttccgagcattacggcatgtccgcctgaagccaacgctttcgtaatatctccggagaatttaataccgccgtctgcgataattgtcgcgccgtgttttctcgcttcagtggcacaatcataaatggcagtgatctgcggtacgcctacacctgcaacgacacgtgtcgtacagatagaaccaggtccgattcccactttgacaatatttgctccggcttcaatcagagcttttgtcgcttcagccgttgcaacatttcctgcgataatgttcagttcaggatatgtttcacggattttcgcaactgtgttcagtacgcctctggaatgtccgtgagccgtatcaaccacgataacgtcgacattcgcttcaacaagcttgctgacgcgtgtcattgtatcgcctgtcacgcctaccgcagcgccgacaataaggcgtccgtgttcatctttagatgaattcgggaattcgataaccttttcaatatctttgatcgtaataagaccctttaatttgttttggtcatccactaacgggagtttttcaattttatgtttctgtaagattttttctgcttcgtctaatgtggttcccacagaagccgtaaccagctcttcttttgtcatgacatcactgattttcattgaataatcagagataaagcgaagatcacggtttgtaatgataccgacaagcttttgatcgtctttattatctacgatcggaacaccggaaattctgtatttccccatcaaatgctccgcatcgaatacttgatgatcaggtgttaaaaagaagggatttgtaataacgccccgttcagaacgtttgactttgtcaacatgttcagcctgctgttcgatggacatgtttttatggataatgcccaagccgccctgtctggccatcgcaatcgccatagctgattctgttactgtatccattcccgcactgatgacaggaatattaagctttaacgtctttgtcagttcaacagataaatccacatcacgcggaagtacgtctgattgagccggtacgagcagtacatcatcgaacgttaagccttcttttgaaaatttactttcccacattagtaaatccccctcttttcggcaaaatattatatgtagattatcaactagaaaacagcatgtcaaggaagcgaaaaagagttgaaatatttagataaaggaaagggtttaaaaatacatatgagagatcatgagtggaaagagttatcattattttattccgtagaatcttcccagaaatttctaaacaaagtctatacagaaagcggcatggaagaaccaaaacgatatgcgtttaagaacagtgagcgcttcatattctttatcaaacacgccgagtccttttataagcaggcatctttttcccctttagaaattaagcctattctgttgttttacgggatgtcacaattgctgaaagcctgtcttctgaccacagatccaagctatccaagccacgcctcagtactcgcgcatggcgtgactgcccggaaacgcaaaaagcaaaattactcctttagggatgatgaagtgaaggtgcagcgcaatggtttatgtattcatgtaatgaagcacttattcgggatagctggtcttgaggaagaacggtacacaatgaagaaattgctgacagccatacctgaattgcatactgtcttttacttccaagagaaaaagaattggctgacccgtgtagagctgaaagatgaccttatttcagtgcctgagcatgcggtgattcattacaatatgtctgattcccgctttgctgaatatatcagccatcatttgaagtggtcttttctgaggaaagaccataaccacttggtttttgaggctgacccgatagacagagaaccttggtcttcgccaaatttattgtttcacttggagaaaaatcaatattacattccctctcagcgtgatcacttcctgcatcttccggaaatgattactcattatttggtcctctacaatatcgggatgattgcgagatatgaaacggagtggtggtatgaactgctgacacagcatgtcagtgatgattatgtgatgatccgccggttcttagaggtcacggaacgcaaatttccgtattacgtttctaatttcctgaagcagtacttataaacaaaaaaggcagctcatgatgagctgcctttaccgtaatgatagcttggcggcgtcctactctcacagggggaaacccccgactaccatcggcgctgaagagcttaacttccgtgttcggcatgggaacgggtgtgacctcttcgctatcgccaccaaaccattgagagtgttctctcaaaactagataacagtaagcatacattcaaattggttaagtcctcgatcgattagtatctgtcagctccatgtgtcgccacacttccacctcagacctatcaacctgatcatctttcagggatcttacttccttgcgg

SEQ ID NO: 19 - DNA, 7257 bp, Bacillus methylotrophicus
tattgttgcagatgagaccgtagaattggcagaaataaaaagagagttagccaaacatctgcctgattatatgatcccggcacaattcatacaggtagatgagattccactatctgcaaatggtaaagtagatcgtaaattattgccgaacccggaacagtttattgaagaaactaagatgataaggggttatgaggcaccaaagacccagacggaaaaattggtagtagaggcatttgaacatgtacttggtatggaaagagtaagtgtaaatgacaatttctttgatttgggtggagattcgattaaggctatccatattctaaacaagataagagaagctggatacgatagctccatgcgaaatcttttgatggagagaacaccaaagctaatagccatgaatttatccacaaaaaaagaaattatgcctgcggagcaaggagaaataactggtgaaatttcaatgacaccaattcaaaactacttcttcgcacaaaatatgatagatcctgaacattttaatgtatgccaagtgtttaaggttcgtgaaaaactaaatgatctggcactacaaaaagctttatctgcgttagtgcagcatcatgatatgttgagagctacgtacaaagataagaaacaggttatagggaaagtagaagataagaaatggtacggctttacaaaaatagcatgtgaatctgaagagattcaggaaaaaattaagacaacgaaagtaaagatggatttggcggaaggaccattattgcaggctgttttatttagtacgccggagcaagattatatgatgttgctagctcatcatatgataatggatgtgatttcctggaggattttaactgaggatttggagaagggctactctcaagctttgaatcaaaaagagataacattaccagctaaaaccgtttcctttaaagtatggagcgaaggattagcttattacagccagagtgaaaagttaaagagaaggttagcttactggtcagaaagagaaaataaattggttgatggtaagttaaaaaaagatggaattgatgatgaattcgaaccaaagacagccgtggcatgtcttaatgccgctatcacagaaaagttattaaaagaaagtgcacatgcttataatacagagattaatgacttgcttgtagcagcactaggacgtgcggtaaacaaagtaacaggtcagagaacgcttgctatacagatggaaggacatggtcgtgaagaaacagtaggctcttttgatttaggtaggacaataggatggttcactagtatatatcccgtagttttagatgagttaggcactaatattgcacaggatattcgaaatacgaaagagacactacgacgcgtaccaggacatggaattgattatggcatcataaagaatgcagccatgggtaatccagaagaaatggatgtagaagtggcaccagatatatcatttaattatcttggagaactaggaacaaagaaagaatctggcgatctatatttcgagttttcacaattaggttatggacaggatacgaatcctcgtaatcaatttggaccatccattaacgtcataggtcatgtgcaaaaaggtagtttatctatgacagtaacctgcaacagcagtcgttatttggctgagagaattgagcaaataggaaaagcatatgaagaagaactgatagcagtcgcagaacattgctcccacgcacagaagagtgagtcaacggcaagtgattttggtgagagcgtatggaaagatagcgaattttgttatgtacaggaagctgtcgaaatccgcggccaggaaattcaacgtatctatccattggctcctgtgcaagagggaatgctctatgagaagcttatggatgaatcatctacaaaatatgttgttcagcagacgttgcgattggcagatgtagatgtagagaagatgcacaaagcttttaagtatttagcaacacagcatgatattttacgtacaaaaatctgttatcggggagtaagtgtaccaagacaagttgtattgaaagaaagaatgccggaatttaattatatggaagtagataatgaatcggattatcttgatttaaaggaacaagatgtaaaacgaggatttgatttagaagaagatacactacttcgtatgaatctgataaaaataaacaacagtggttatcggttgatcatgacaaaccatcatattattttagatggttggtgtttgccaattttgcgtaaagaattatttagtgcgtatatggcaacagatgaagaacaattaaaaacacctaatcaggctgcttctaataaaatgggtagctatgaaaagtttgtccattatataaatgaaaaagataaagagacgagccttaaatattgggaagaccttcttcaaggatatgagacaagggctgatattctacctttaggtcgtccagatgaaacagaagaagagagtcagagccaagagtttaagttaagcatagaggtaactgaacaagcagaagcgatatgtgcccaatatgatgtaacattgaacacgctagtagaagcttgttggggcgttttattggaaaaatacaactcaacaaatgatgttgtatttggaaaagttgtatctggtagaaatgcagagattgaaggtattgaagaaatcgttggtttatttatcaatacaatacccgtacgtatatcgacaacaaacgaagacacctttgccgatttgttgaaatcattacagagccaggcaattattgcaaatgaacacgattttcttcccttagcagaaatacagaatcatactttattaggaagagatctaattggaacattattcttctttgaaggctatcaaggaacaagtataaatattgatggcaaattaaatgtggaatccgaatattaccgcgaacaaattgggtatgacttgggaatgacagcatttaagagtgatcgtatccattttagaattcttttcaatacaaagctatataacaaggaacaaataaacattattggttcccatctgcaaaggcttatggaacaagcaattgcagcaccacagacgaaattaatcgaattaggcatgaccagtgaagcagaagaaatgaaagaattagtacagtttaacgcaacggacagcgactatccaagagacaagacaattgtacaattatttgaagaacaagtagcaagaaccccccataatacagcagttgtatgcgggaatgagcaattgagttacgctgaattaaatgctcgtgccaatcagctttcattaaagttacgacgggaataccatgtccagcctgatgattttgttgcgattatagcagaaagaagtttggagatggtgatcgggttatatgccatcataaagtcgggtgcagcatatgtacccattgacccattgtatccagaagaacgtatcgagtatatattggaagatagccagcctaaagcggttttaattggtcatggaaagtataatatttctcctgaaaaggttgttaacttatatagtgaaagcaattatggagaaggtgcagggaatctagaacatgtaaatactcctcgtgatcttatttatctggtttatacatcgggtacaacaggaaaaccaaaaggggttatggtagagcatcagaatatagtcaatcagcagatgtggacacaaagagaatacccattacacgagggagaatctcttttaatgaagaccacttgtgcatttgatgtttttgcctgggaagtattttggtggatgttagcgggtggtaaacttgttattttgcaacaaggagaagaaagtcaaagtgataagatcatcaaggtaattcaggattataaagtcaatgcaatccagttcgttccttccatgttcaatatgtttctaaaagaattagatatgagcaaagaaaaaataaatactctgcgttatatcattaatattggtgagaaactgaatgcggaaagtgtgagacattataatcaattaagggaaaaaggacaagtaagagcagaactactgaatctctatggtccagcagaaactacagttaattccagtggatatcattgtccaacaggcttagatgtagataaaatattaattggtaagcctattagtaatacacaaatttatatattatcaaatgaaaaaatagccggaataggtgtaccaggggaattatgtattgcaggagaaagtgtgtcgcgtggatacttaaatcgtgaagaattaacagctcagaaatttattaaaaatccttttggttcaggaatgatgtataaaacaggtgatctggcacggtggataccggatggaaatatcgagtaccttggccgtatagatgatcaagttaagataagaggtttcagaatcgaaccaggagaaattgaaagtactttgatggagctcgaaggagttagtggagcagccgttgtagtacgacaagacaagcaaggagaaaaatatctgtgtgcttatgtagtcgttcatacagaaatagaagaattagacgaagatacaatcaagagtgaattacgcaagaagttaccagactatatggttcctgtgtatattattcgaattgaccaaattccattaagtcataatggaaagctggacaaagcggcactaccagaaccagaatacaagcctaaggaatatgtagcaccaataaatagagaagagaagttaatagttgaagcatttgaaaaagtccttggaataacaggaattagtgtcaatgatagcttttttgacttgggtggtcattcactgaaagttacattattgtgtaatgaattagaaaagacaatcggtataagactgcagcttagtgaaatatttgctttatctacaccaaaacgtattgcagaaagaattggaagcttacaacaggatcgtttttcggaaataccgaaaatagctgaagcagagttctatcctatgagttctgttcaaaagcgactttatcttctcaatgagatagtaggtcctagtatttcctataacatttcgaatgtcataaaatacgaaaacactctggataaagagcagttacagggagcattagataagctcttagagagagaagaagtattaagaaccagcttccatcttattaatggagagccagttcaagtgattcaaccagatgcgagagtagtattggaatacaaagaagcagatacactagatattcaagatgaatatgatcgttttgtttgcccatttgatttattcaaagcacctttgatgcgggttaagttattacagacaccacaagcttcatacttgatgctggatattcatcatattgtttctgatggagaaagtctgcctattatgatgaactggataagcgagttatatgaaggaaatactttaccaatcccaaggcttcattataaagatttctctgcttggcaaatgactcaggatattacgaagcaggcggcatattggaaaaacgagttcttaggcgaaattccaatacttaatttgaatacagatttccaacgtcctaagaaaaagagcttcaatggtgccaacgtaaaaactaagattgaagaaccagtttttatggaaataaaagaattagcgaagaagcatggtgctacggaattcatgactatgttatcaacctttatgattctattgagcaaatacagtcaacaggaagaaattgtagtcggaactcctgtatcaggtagaacccacgttgatacacaagaaatgctggggatgtttgtaaactccttggctatcaaaggaaaagtgaaacaagaggagagttttgaacaagtattgcttggagtaaaagaaaaatgtcttcgtgcgtacgataatcaggactttcaatatgaagacttggttgaggcagtagatgtaaagagagatttatcaagaaatccattatttgatgtaatgttcatgatgccagagagtgaaattatgtctggttcaaagagcattgtgagtggaacatgggtaccaatggaaggaaaagtagctaagtttgatctgaatttaatggtaatacacacatcagagggttatgtggtcaacttagagtattctacagatttatttaaacaggaaacgataaagcaaatgctggatgattatgttttattactatcagaagttataaaacatccagaagaccgtttgcaagagctacttaagaaagaggatgttaagaaagaggagaaagattcgacccaagcagagcttgatcatcgtgccaatcatctggcacagcaagtttcagatttgatgcgggcattgcagcaaagagatcaagcttattggaaggcaaaagtagacaatttcccgcatgcacctcagttaccacttcttccaaatgggaatgctgtaaacaacgcaacagtaaaacgtttagaaacgagaattgctgcgacagactgggcgattgtgagaaacaaggctttggataacaaaattgcaccatctgcgttattgtgcacaatatatgcggaagttctatttaaatggagcaatcaatccaatatggcacttagcttaaatctgtttagtaatcagccttttcatcaagatggaatgtctctgatgggggatttcgtatcgaaattgttgttagatatcgatttatcatctcatagaccattttgggaaagaactactgagattcagaatcggttatttgaagcgttagaccacagattttacagtggggttgatttcctgcgtgatctggctgaacaccgtggtcaagaaggtcaagctataatgccaattgtatttacgagtatgcttcgtgacgaagtagattttttcaatgccaatataggtagtaggggagaattgaaatacggaataaatcagacccctgaagtgtttttggacttccaagttgcggaaagcgacggacaattaattgtgacttgggattatgcaaaagatttgtttgatgaagacatgatcagtgccatgtttgaaacgtatcaacttcgattacagcaagttatagacaataaactttcatctatgccgctgcctgtaacacagtatcaactactgcttgattacaatcgtacacaaggagattatgaaggggatttactgcaaagattaatagaccagcaatgccagaagactcccgatgctattgcagtcaaattaggacaggatacattgacctatggcgagttggcgagaaaatccaatcaggtcgctcg

SEQ ID NO: 20 - DNA, 4028 bp, Bacillus methylotrophicus
acgatgcgtagccgacctgagagggtgatcggccacactgggactgagacacggcccagactcctacgggaggcagcagtagggaatcttccgcaatggacgaaagtctgacggagcaacgccgcgtgagtgatgaaggttttcggatcgtaaagctctgttgttagggaagaacaagtgccgttcaaatagggcggcaccttgacggtacctaaccagaaagccacggctaactacgtgccagcagccgcggtaatacgtaggtggcaagcgttgtccggaattattgggcgtaaagggctcgcaggcggtttcttaagtctgatgtgaaagcccccggctcaaccggggagggtcattggaaactggggaacttgagtgcagaagaggagagtggaattccacgtgtagcggtgaaatgcgtagagatgtggaggaacaccagtggcgaaggcgactctctggtctgtaactgacgctgaggagcgaaagcgtggggagcgaacaggattagataccctggtagtccacgccgtaaacgatgagtgctaagtgttagggggtttccgccccttagtgctgcagctaacgcattaagcactccgcctggggagtacggtcgcaagactgaaactcaaaggaattgacgggggcccgcacaagcggtggagcatgtggtttaattcgaagcaacgcgaagaaccttaccaggtcttgacatcctctgacaatcctagagataggacgtccccttcgggggcagagtgacaggtggtgcatggttgtcgtcagctcgtgtcgtgagatgttgggttaagtcccgcaacgagcgcaacccttgatcttagttgccagcattcagttgggcactctaaggtgactgccggtgacaaaccggaggaaggtggggatgacgtcaaatcatcatgccccttatgacctgggctacacacgtgctacaatggacagaacaaagggcagcgaaaccgcgaggttaagccaatcccacaaatctgttctcagttcggatcgcagtctgcaactcgactgcgtgaagctggaatcgctagtaatcgcggatcagcatgccgcggtgaatacgttcccgggccttgtacacaccgcccgtcacaccacgagagtttgtaacacccgaagtcggtgaggtaacctttatggagccagccgccgaaggtgggacagatgattggggtgaagtcgtaacaaggtagccgtatcggaaggtgcggctggatcacctcctttctaaggattttaacggaatataagaccttgggtcttataaacagaacgttccctgtcttgtttagttttgaaggacaggaggtcagcggttcgatcccgctaggctccaccaacgtgttctttgaaaactagataacagaagtaattcacattcaattagtaatgcaagatatcacgtagtgattctttttaacggttaagttagaaagggcgcacggtggatgccttggcactaggagccgatgaaggacgggacgaacaccgatatgcttcggggagctgtaagcaagctttgatccggagatttccgaatggggaaacccaccactcgtaatggagtggtatccatatctgaatacataggatatgagaaggcagacccggggaactgaaacatctaagtacccggaggatactccctagtgaccgatagtgaaccagtaccgtgagggaaaggtgaaaagcaccccggaaggggagtgaaagagatcctgaaaccgtgtgcctacaagtagtcagagcccgttaacgggtgatggcgtgccttttgtagaatgaaccggcgagttacgatcccgtgcaaggttaagcagaagatgcggagccgcagcgaaagcgagtctgaatagggcgaattgagtacgtggtcgtagacccgaaaccaggtgatctacccatgtccagggtgaagttcaggtaacactgaatggaggcccgaacccacgcacgttgaaaagtgcggggatgaggtgtgggtaggggtgaaatgccaatcgaacctggagatagctggttctctccgaaatagctttagggctagcctcaaggtaagagtctcggaggtagagcactgattggactaggggcccctaccgggttaccgaattcagtcaaactccgaatgccgatgacttatccttgggagtcagactgcgagtgataagatccgtagtcgaaagggaaacagcccagaccgccagctaaggtcccaaagtatacgttaagtggaaaaggatgtggagttgcttagacaaccaggatgttggcttagaagcagccaccatttaaagagtgcgtaatagctcactggtcgagtgactctgcgccgaaaatgtaccggggctaaacgtatcaccgaagctgcggactgttcttcgaacagtggtaggagagcgttctaagggctgtgaagcaagaccggaaggacttgtggagcgcttagaagtgagaatgccggtatgagtagcgaaagaggggtgagaatcccctccaccgaatgcctaaggtttcctgaggaaggctcgtccgctcagggttagtcgggacctaagccgaggccgaaaggcgtaggcgatggataacaggttgatattcctgtaccacctcctcaccatttgagcaatggggggacgcaggaggatagggtaagcgcggtattggatatccgcgtccaagcagttaggctgggaaataggcaaatccgtttcccgtgaaggctgagctgtgatggcgagcgaattatagtagcgaagttcctgattccacactgccaagaaaagcctctagcgaggtgagaggtgcccgtaccgcaaaccgacacaggtaggcgaggagagaatcctaaggtgatcgagagaactctcgttaaggaactcggcaaaatgaccccgtaacttcgggagaaggggtgctctgttagggtgcaagcccgagagagccgcagtgaataggcccaggcgactgtttagcaaaaacacaggtctctgcgaagccgtaaggcgaagtataggggctgacgcctgcccggtgctggaaggttaagaggagcgcttagcgtaagcgaaggtgcgaattgaagccccagtaaacggcggccgtaactataacggtcctaaggtagcgaaattccttgtcgggtaagttccgacccgcacgaaaggcgcaacgatctgggcactgtctcaacgagagactcggtgaaattatagtacctgtgaagatgcaggttacccgcgacaggacggaaagaccccgtggagctttactgcagcctgatattgaatgttggtacagcttgtacaggataggtaggagccttggaaaccggagcgccagcttcggtggaggcatcggtgggatactaccctggctgtattgaccttctaacccgccgcccttatcgggcggggagacagtgtcaggtgggcagtttgactggggcggtcgcctcctaaaaggtaacggaggcgcccaaaggttccctcagaatggttggaaatcattcgcagagtgtaaaggcacaagggagcttgactgcgagacctacaagtcgagcagggacgaaagtcgggcttagtgatccggtggttccgcatggaagggccatcgctcaacggataaaagctaccccggggataacaggcttatctcccccaagagtccacatcgacggggaggtttggcacctcgatgtcggctcatcgcatcctggggctgtagtcggtcccaagggttgggctgttcgcccattaaagcggtacgcgagctgggttcagaacgtcgtgagacagttcggtccctatccgtcgcgggcgcaggaaatttgagaggagctgtccttagtacgagaggaccgggatggacgcaccgctggtgtaccagttgttctgccaagggcatcgctgggtagctatgtgcggacgggataagtgctgaaagcatctaagcatgaagcccccctcaagatgagatttcccattccg

SEQ ID NO: 21 - DNA, 1542 bp, Bacillus methylotrophicus
gcaggttacccacgtgttactcacccgtccgccgctaacatcagggagcaagctcccatctgtccgctcgacttgcatgtattaggcacgccgccagcgttcgtcctgagccaggatcaaactctccgataaagtagtttgactgactacgcacatcgctgtgcgatttatttaaaactttgaattaacaggtacgttttgtcttgtttagttttcaaagatcattaccgcttgttgaagcagctttattatcttaccactcagcttcttttatgtcaacaactttttttacgttgttcccgaagctttttgttgttgtctgctgttcatcagcgacgtttaataatataccacggtgtctctctataaatcaagcatttttttaaaaaaggagaaaaaaagaaaaccagtatattatctttaaagtttgagaatggtcgggaagacaggattcgaacctgcgaccccatggtcccaaaccatgtgctctaccaagctgagctacttcccgatttttaaatatattatggcgcgcccgagaggagtcgaacccctaaccttttgatccgtagtcaaacgctctatccaattgagctacgggcgcaatcaatttcacaatatcccgttgggataaaatggagcggaagacgggattcgaacccgcgacccccaccttggcaaggtgatgttctaccactgaactacttccgcaagtaaaaatgtaatgtacagccagaatacagcatcagataacccaaaaactgtattgttatttattcagtaaaactccaaacggtataacccgcagattaatctaaagcatactgttcattatgacaaaagtaattatatcaaggttttgataaaagtcaataccgtttaacaattaattatgttaatctcttttgcatccttaaagaaaggcttcatcagaagacgcgctaaatacctataccttaactgatacaatcagcaacagatttttactgaactaaacaaaaaataacagtcccataacaagcggaaactgcttcagatcaacgtatttagataagcttccaagcgggctcgaaccgctgacctcttccttaccatggaagtgctctacctgctgagctatggaagcaatggctccgcaggtaggactcgaacctacgaccgatcggttaacagccgatagctctaccactgagctactgcggaatattataagcttcataaacaaaaacatggtagataaaataaaaagcttggcggcgtcctactctcacagggggaaacccccgactaccatcggcgctgaagagcttaacttccgtgttcggcatgggaacgggtgtgacctcttcgctatcgccaccaaaccattgagagtgttctctcaaaactagataacagtaagcatacattcaaattggttaagtcctcgatcgattagtatctgtcagctccatgtgtcgccacacttccacctcagacctatcaacctgatcatctttcagggatcttacttccttgcggaatgggaaatctcatcttgag

SEQ ID NO: 22 - DNA, 1504 bp, Bacillus methylotrophicus
tgtctgaaccatgcggttcagacaaccatccggtattagccccggtttcccggagttatcccagtcttacaggcaggttacccacgtgttactcacccgtccgccgctaacatcagggagcaagctcccatctgtccgctcgacttgcatgtattaggcacgccgccagcgttcgtcctgagccaggatcaaactctccgataaagtagtttgactgactacgcacatcgctgtgcgatttatttaaaactttgaattaacaggtacgttttgtcttgtttagttttcaaagatcattttgttcactttctcaagcaactttttaaatatataataagtttcttttaaagtcaacatattttttataaatggtggagcctagcgggatcgaaccgctgacctcctgcgtgcaaagcaggcgctctcccagctgagctaaggccccgaagtggtcgggaagacaggattcgaacctgcgaccccatggtcccaaaccatgtgctctaccaagctgagctacttcccgatttttaaaaatattatggcgcgcccgagaggagtcgaacccctaaccttttgatccgtagtcaaacgctctatccaattgagctacgggcgcataacaatgaatgccgagggccggacttgaaccggcacggtagtcacctaccgcaggattttaagtcctgtgtgtctgccaattccaccaccccggcgtggatggtatagttggagcggaagacgggattcgaacccgcgacccccaccttggcaaggtggtgttctaccactgaactacttccgcatacaggataactatcctgtataatgcgggtgaagggacttgaacccccacgtcataagacactagatcctaagtctagcgcgtctgccaattccgccacacccgcgtaacatggtgagccatgaaggactcgaaccttcgaccctctgattaaaagtcagatgctctaccaactgagctaatggctctttttaaaagacttatgttattatcttgtccaaaaatggtgccggccagaggacttgaacccccaacctactgattacaagtcagttgctctaccaattgagctaggccggcaaatatggtggaggatgacgggctcgaaccgccgaccctctgcttgtaaggcagatgctctcccagctgagctaatcctccatatattacacttacgtgtaatagcttggcggcgtcctactctcacagggggaaacccccgactaccatcggcgctgaagagcttaacttccgtgttcggcatgggaacgggtgtgacctcttcgctatcgccaccaaaccattgagagtgttctctcaaaactagataacagtaagcatacattcaaattggttaagtcctcgatcgattagtatctgtcagctccatgtgtcgccacacttccacctcagacctatcaacctgatcatctttcagggatcttacttccttgcggaatgggaaatctcatcttgagg

SEQ ID NO: 23 - DNA, 1286 bp, Bacillus methylotrophicus
gggactgccccccgtttttgagacaggggtcaaaacaccttttaaacagccaattgccgatagtttatcggtgattggttgtttagtttggtttgaatacgaatattgttataataatgaatgtattctatgacagtgcgttctacgatggcagtcgtagttcgatcaatgctgttaagatagaacgtttcagactttagcgaggaatgaaacgattcgatggaggcattatcagcgggcgtccctttgcgggacatgctcatggtaatgccttttgttttaacagctttttgatactcgtaagatgtatacacagaaccttggtcactatgtaacacgcagttctcaggcagcattggtagctgatcaagtgtgtctaagacaaaggctgtgtcctgcttatccccaatagtaaaagcaatcacttctccattgtataaatctaatatactggaaaggtacaattgtttctgtccataaggcaaatatgtgatgtccgttactagtttttcaagaggacgatcagactgaaagttccgatccaatatattatcgaccacggcatatggctgcccatccttcttgcgctttttcaccttaacccgacactgccattgatttttctgcataatacgttgaaccgttttatggttaatacacattctcttttttagtatggctgtgatttttcgatatccatatcgatacttgtgctctcggcacaacgtgccgatttgtttttccaaatggcgcttgggatgatccttcatcagattcttcttccaacgataataagacgctcgagagatacctaaatgaatacagatatcctgtacggtcattgtgctgtgcaatatttctacaagttcgactgacgtttcgctatcaacttcctttccaattcgttgtacttttttaaaacttcattctgttgtctcaggtaacgaatctctgcctgcagtttctctaaatcggaagaatactccggaccttttccgtaagtgtattgctttccaacaggctgttcgaatcgatgtgtatcaccagccttataccatctaacccatgtctgaacctgtgtcttattcttaatattcaactcctgcaggatctctttcataggtacgcctgccaatctcatttctacagccttctgtttcacttcaaccggataactcactcttgtccccatagaaaaaacacctccaagtctaatttcggataacaatcatccgtattcaaacttgaaggtgtttttatttgtctcatcttatggggtcagtccc

SEQ ID NO: 24 - DNA, 988 bp, Bacillus methylotrophicus
aagcgagctcttccaccgtcggccgggcgaagatgtcctgtaacggcacctgaacaccgaactctttggcgatgcgggagacgagagccgtcgcttttaacgaatggccgccccgctcaaaaaagtgatcccggatgccgacggggccgtttttcagcacctcttcccaaagggcgcaaagcttcatttccgtgacgttccgcggggcggtgtacgcctgtctgtctgccgctccgtcgggagccggaagcgcgcggcggtcaagttttccgctcggcgtgaccggccattcgctcatctctataaactgagccggcatcatgtaggccggaaggtgtgtcgcaagctccgcccgcacgtcatcgctttcccgtccttcgatataggcgtaaagcgcggtttcgccgtgttcggtccgggcggtgacggccgcctcacgaatgccgccgatgcgccggatcgccgcttcgatttcccccggttcaatccggtagccgcggactttcacctgtccgtctgaacgtccgagccattcgactaggccgtcttctgtccagcgtgcgatatcgcccgtctgatacatgcgttctcccgggtaaaacggatcatcgagaaaacgctcctccgtcagctcgggctggttcagatagccccgggccacccctgtccccgcgatgtacagctctcctgccacgcccgcaggctggatggttcctccgctatctaatacatacagacgggcaccaggaacgggtttaccaatcggaagccttgtccgtccgctgtcccgttttcggtcacagacgtaaaacgccgcatccaccgtcgcttccgtcggcccgtagccgtgaataagcacggtctccggcagaagatcggcaaaccgggcagccgtaagcggtgaaagagcttcccctccggcaaacacgcgtgtcaaggttctgccgaggcgtgttcttgtttccgcaggctctgtttccagcgcgtc

SEQ ID NO: 25 - DNA, 667 bp, Bacillus methylotrophicus
gcgtgaagctggaatcgctagtaatcgcggatcagcatgccgcggtgaatacgttcccgggccttgtacacaccgcccgtcacaccacgagagtttgtaacacccgaagtcggtgaggtaacctttatggagccagccgccgaaggtgggacagatgattggggtgaagtcgtaacaaggtagccgtatcggaaggtgcggctggatcacctcctttctaaggattttaacggaatataagaccttgggtcttataaacagaacgttccctgtcttgtttagttttgaaggatcattccttcaaaacataggaacacctgctaaatgcgccacttcctgtggcaacgcatgtgttagcatgtcctatgcgttgttctttgaaaactagataacagaagtaattcacattcaattagtaatgcaagatatcacgtagtgattctttttaacggttaagttagaaagggcgcacggtggatgccttggcactaggagccgatgaaggacgggacgaacaccgatatgcttcggggagctgtaagcaagctttgatccggagatttccgaatggggaaacccaccactcgtaatggagtggtatccatatctgaatacataggatatgagaaggcagacccggggaactgaaacatctaagtacccggag

SEQ ID NO: 26 - DNA, 649 bp, Bacillus methylotrophicus
ccccagttggtccggtatctcccgtaaccccagttgaccccgtcgctccagcagctccggttggacccgtgattcccgtcgccccagttggtccggtatctcccgtaaccccagttggtccggtatcccccgtcgccccagttgatccggtatctcccgtaaccccagttgaccccgtcgctccagtagctccggttggacccgtgattcccgtcgccccagttgatccggtatctcccgtaaccccagttgaccccgtcgctccagtggctccggttggacccgtagttcccgtcgccccagttggtccgatatctcccgtaaccccagttggtccggtatcccccgtaaccccagttggtccggtatctcccgtaaccccagttgaccccgtcgctccagcagctccggttggacccgtgattcccgtcgccccagttggtccggtatctcccgtaaccccagttggtccggtatcccccgtcgccccagttgatccggtatctcccgtaaccccagttgaccccgtcgctccagtagctccggttggacccgtgattcccgtcgccccagttgatccggtatctcccgtaaccccagttgaccccgtcgctccagtggctccggttggacccgtagttcccgtcgc

SEQ ID NO: 27 - DNA, 19 bp, Artificial sequence
  Synthetic sequence
ctccagctcgtccgaggat

SEQ ID NO: 28 - DNA, 20 bp, Artificial sequence
  Synthetic sequence
agccatgtgctgctggttat

SEQ ID NO: 29 - DNA, 20 bp, Artificial sequence
  Synthetic sequence
tcgactacgagatgcgggtc

SEQ ID NO: 30 - DNA, 21 bp, Artificial sequence
  Synthetic sequence
cagaagatgtcggagagcgtg

SEQ ID NO: 31 - DNA, 20 bp, Artificial sequence
  Synthetic sequence
agctgacgacctctttgagc

SEQ ID NO: 32 - DNA, 20 bp, Artificial sequence
  Synthetic sequence
ctaccgggtcagcttccatc

SEQ ID NO: 33 - DNA, 20 bp, Artificial sequence
  Synthetic sequence
agacctcccacctctcttgg

SEQ ID NO: 34 - DNA, 20 bp, Artificial sequence
  Synthetic sequence
gctcagtctccaattggcct

SEQ ID NO: 35 - DNA, 20 bp, Artificial sequence
  Synthetic sequence
gatcgcgtgcaacagattcc

SEQ ID NO: 36 - DNA, 20 bp, Artificial sequence
  Synthetic sequence
actcgctgaacttctgggtc

SEQ ID NO: 37 - DNA, 23 bp, Artificial sequence
  Synthetic sequence
aagaagacagctcaactgcgtgc

SEQ ID NO: 38 - DNA, 23 bp, Artificial sequence
  Synthetic sequence
ttgcaagagcacattggatccgc

SEQ ID NO: 39 - DNA, 24 bp, Artificial sequence
  Synthetic sequence
gaagtttgaggcaataacaggtct

SEQ ID NO: 40 - DNA, 25 bp, Artificial sequence
  Synthetic sequence
atcacgatgaatttcccaagattac

SEQ ID NO: 41 - DNA, 20 bp, Artificial sequence
  Synthetic sequence
agcgagtcgacgataccctt

SEQ ID NO: 42 - DNA, 20 bp, Artificial sequence
  Synthetic sequence
tgctaatctgctccaatggc

SEQ ID NO: 43 - DNA, 18 bp, Artificial sequence
  Synthetic sequence
caagtgccgttcaaatag

SEQ ID NO: 44 - DNA, 18 bp, Artificial sequence
  Synthetic sequence
ctctaggattgtcagagg

SEQ ID NO: 45 - DNA, 1505 bp, Bacillus methylotrophicus
aagtttgatcctggctcaggacgaacgctggcggcgtgcctaatacatgcaagtcgagcggacagatgggagcttgctccctgatgttagcggcggacgggtgagtaacacgtgggtaacctgcctgtaagactgggataactccgggaaaccggggctaataccggatggttgtctgaaccgcatggttcagacataaaaggtggcttcggctaccacttacagatggacccgcggcgcattagctagttggtgaggtaacggctcaccaaggcgacgatgcgtagccgacctgagagggtgatcggccacactgggactgagacacggcccagactcctacgggaggcagcagtagggaatcttccgcaatggacgaaagtctgacggagcaacgccgcgtgagtgatgaaggttttcggatcgtaaagctctgttgttagggaagaacaagtgccgttcaaatagggcggcaccttgacggtacctaaccagaaagccacggctaactacgtgccagcagccgcggtaatacgtaggtggcaagcgttgtccggaattattgggcgtaaagggctcgcaggcggtttcttaagtctgatgtgaaagcccccggctcaaccgggaagggtcattggaaactggggaacttgagtgcagaagaggagagtggaattccacgtgtagcggtgaaatgcgtagagatgtggaggaacaccagtggcgaaggcgactctctggtctgtaactgacgctgaggagcgaaagcgtggggagcgaacaggattagataccctggtagtccacgccgtaaacgatgagtgctaagtgttagggggtttccgccccttagtgctgcagctaacgcattaagcactccgcctggggagtacggtcgcaagactgaaactcaaaggaattgacgggggcccgcacaagcggtggagcatgtggtttaattcgaagcaacgcgaagaaccttaccaggtcttgacatcctctgacaatcctagagataggacgtccccttcgggggcagagtgacaggtggtgcatggttgtcgtcagctcgtgtcgtgagatgttgggttaagtcccgcaacgagcgcaacccttgatcttagttgccagcattcagttgggcactctaaggtgactgccggtgacaaaccggaggaaggtggggatgacgtcaaatcatcatgccccttatgacctgggctacacacgtgctacaatggacagaacaaagggcagcgaaaccgcgaggttaagccaatcccacaaatctgttctcagttcggatcgcagtctgcaactcgactgcgtgaagctggaatcgctagtaatcgcggatcagcatgccgcggtgaatacgttcccgggccttgtacacaccgcccgtcacaccacgagagtttgtaacacccgaagtcggtgaggtaacctttatggagccagccgccgaaggtgggacagatgattggggtgaagtcgtaacaagt

SEQ ID NO: 46 - DNA, 20 bp, Artificial sequence
  Synthetic sequence
ctgttccgagtatccctatg

SEQ ID NO: 47 - DNA, 18 bp, Artificial sequence
  Synthetic sequence
cgagcagatcacgatgta

SEQ ID NO: 48 - DNA, 21 bp, Artificial sequence
  Synthetic sequence
actactccgacactgtatatg

SEQ ID NO: 49 - DNA, 19 bp, Artificial sequence
  Synthetic sequence
ccaatgtcgaaaccttcag

SEQ ID NO: 50 - DNA, 20 bp, Artificial sequence
  Synthetic sequence
cagcaggaaaaggatttggg

SEQ ID NO: 51 - DNA, 20 bp, Artificial sequence
  Synthetic sequence
actccactgaattgaacccg

SEQ ID NO: 52 - DNA, 20 bp, Artificial sequence
  Synthetic sequence
gcacaagcacacacttcata

SEQ ID NO: 53 - DNA, 20 bp, Artificial sequence
  Synthetic sequence
aagcgtgaagactgcaatag
